(19) United States
(12) Patent Application Publication
(10) Pub. No.: US 2007/0010434 A1
(43) Pub. Date: Jan. 11, 2007

(54) Novel compositions and methods for the treatment of immune related diseases

(75) Inventors: Henry Chiu, South San Francisco, CA (US); Hilary Clark, South San Francisco, CA (US); Kathryn Dennis, South San Francisco, CA (US); Sherman Fong, South San Francisco, CA (US); Jill R. Schoenfeld, South San Francisco, CA (US); William I. Wood, South San Francisco, CA (US); Thomas D. Wu, South San Francisco, CA (US)

Correspondence Address: GENENTECH, INC., 1 DNA WAY, SOUTH SAN FRANCISCO, CA, 94080, US

(73) Assignee: GENETECH, INC., SOUTH SAN FRANCISCO, CA (US)

(21) Appl. No.: 10/528,260

(22) PCT Filed: Sep. 15, 2003
(86) PCT No.: PCT/US03/29097

§ 371 Date: Apr. 25, 2006

Related U.S. Application Data
(60) Provisional application No. 60/411,392, filed on Sep. 16, 2002.

(51) Int. Cl. A61K 38/17; C07H 21/04; C12P 21/06; C12N 9/00

(52) U.S. Cl. 514/12; 530/350; 435/69.1; 435/320.1; 435/325; 435/183; 530/388.1; 536/23.2

(57) ABSTRACT

The present invention relates to compositions containing novel proteins and methods of using those compositions for the diagnosis and treatment of immune related diseases.

### FIELD OF THE INVENTION

[0001] The present invention relates to compositions and methods useful for the diagnosis and treatment of immune related diseases.

### BACKGROUND OF THE INVENTION

[0002] The B lymphocytes play a major role in the humoral immune response as the antibody producing cells. The B cells can generate a highly diverse antibody repertoire that is reactive to almost all potential antigens. Through a process of maturation and clonal selection in the bone marrow, a highly diverse B cell population develops with each B cell clone expressing an antigen specific cell surface receptor, the B cell receptor (BCR), which bear the same specificity as the secreted antibody made by the B cell. These mature cells are involved in immunity against foreign and infectious agents, as well as autoimmunity, whereby they produce autoantibodies against self constituents.

[0003] The BCR complex on mature cells is composed of membrane IgM and IgD molecules associated with the invariant Igα and Igβ heterodimers, which contain two immunoreceptor tyrosine-based activation motifs (ITAM) in their cytoplasmic tails. Mature BCR bearing B cells seed the peripheral blood and recirculate through the primary lymphoid tissues, such as the lymph nodes, spleen, and mucosal lymphoid tissues. Cross-linking of membrane Ig by multivalent antigen triggers clustering of the Igα and Igβ heterodimers and leads to tyrosine phosphorylation of the ITAMs by the SRC-family protein tyrosine kinases (PTKs), such as Lyn, Fyn, Blk, and Lck. Since the BCR complex lacks intrinsic kinase activity and is believed excluded from lipid rafts in the membrane, oligomerized BCR are translocated to lipid rafts, where Lyn resides constitutively to mediate tyrosine phosphorylation of the ITAM domains. This BCR signaling process is dependent on a receptor-inducible assembly mechanism, associated with the recruitment of PTKs, adaptors or linker proteins, and effector enzymes to the cytoplasmic side of the plasma membrane. The linker proteins, such as BLNK, BCAP, GAB, PAG, and LAT help localize enzymatic complexes to the appropriate subcellular site for signaling. These linker proteins link cell surface receptors with effector enzymes and help modulate signal transduction by mediating protein-protein or protein-lipid interactions.

[0004] The stimulation of B cells with anti-CD40 can mimic B cell activation via BCR. CD40 ligation has been shown to induce B cell growth, survival, differentiation, Ig switching, germinal center formation, and enhancement of antigen presentation by B cells. CD40 ligation not only enhances the expression of PIM-1, a protooncogene that encodes a serine/threonine protein kinase, via NF-κB activation, but stimulates JNK, p38 kinases, and protein kinase C independent activation of ERK2, similar to stimulation of B cells with anti-IgM. CD40 ligation also induces phosphorylation of tyrosine kinases Lyn, Fyn, and Syk. The combination of IL-4 and anti-CD40 stimulation leads to enhanced B cell proliferation and Ig secretion. Therefore, a microarray experiment comparing differential expression of RNA from anti-CD40 and IL-4 stimulated vs resting B cells, can reveal new genes associated with B cell activation. Gene products associated with B cell activation can be targets for therapeutic drug development in the treatment of autoimmune mediated inflammatory diseases and B cell malignancies, as well as provide insights into genes that are defective in immune deficiency disorders.

[0005] Despite the above identified advances in B cell research, there is a great need for additional diagnostic and therapeutic agents capable of detecting the presence of a B cell mediated disorder in a mammal and for effectively reducing this disorder. Accordingly, it is an objective of the present invention to identify polypeptides that are overexpressed in activated B cells as compared to resting B cells, and to use those polypeptides, and their encoding nucleic acids, to produce compositions of matter useful in the therapeutic treatment and diagnostic detection of B cell mediated disorders in mammals.

### SUMMARY OF THE INVENTION

[0006] A. Embodiments

[0007] The present invention concerns compositions and methods useful for the diagnosis and treatment of immune related disease in mammals, including humans. The present invention is based on the identification of proteins (including agonist and antagonist antibodies) which are a result of stimulation of the immune response in mammals. Immune related diseases can be treated by suppressing or enhancing the immune response. Molecules that enhance the immune response stimulate or potentiate the immune response to an antigen. Molecules which stimulate the immune response can be used therapeutically where enhancement of the immune response would be beneficial. Alternatively, molecules that suppress the immune response attenuate or reduce the immune response to an antigen (e.g., neutralizing antibodies) can be used therapeutically where attenuation of the immune response would be beneficial (e.g., inflammation). Accordingly, the PRO polypeptides, agonists and antagonists thereof are also useful to prepare medicines and medicaments for the treatment of immune-related and inflammatory diseases. In a specific aspect, such medicines and medicaments comprise a therapeutically effective amount of a PRO polypeptide, agonist or antagonist thereof with a pharmaceutically acceptable carrier. Preferably, the admixture is sterile.

[0008] In a further embodiment, the invention concerns a method of identifying agonists or antagonists to a PRO polypeptide which comprises contacting the PRO polypeptide with a candidate molecule and monitoring a biological activity mediated by said PRO polypeptide. Preferably, the PRO polypeptide is a native sequence PRO polypeptide. In a specific aspect, the PRO agonist or antagonist is an anti-PRO antibody.

[0009] In another embodiment, the invention concerns a composition of matter comprising a PRO polypeptide or an agonist or antagonist antibody which binds the polypeptide in admixture with a carrier or excipient. In one aspect, the composition comprises a therapeutically effective amount of the polypeptide or antibody. In another aspect, when the composition comprises an immune stimulating molecule, the composition is useful for: (a) stimulating or enhancing an immune response in a mammal in need thereof, (b) increasing the proliferation of B-lymphocytes in a mammal in need thereof in response to an antigen, (c) increasing the Ig secretion of B-lymphocytes. In a further aspect, when the composition comprises an immune inhibiting molecule, the composition is useful for: (a) inhibiting or reducing an immune response in a mammal in need thereof, (b) decreasing the proliferation of B-lymphocytes or (c) decreasing the Ig secretion by B-lymphocytes in a mammal in need thereof in response to an antigen. In another aspect, the composition comprises a further active ingredient, which may, for example, be a further antibody or a cytotoxic or chemotherapeutic agent. Preferably, the composition is sterile.

[0010] In another embodiment, the invention concerns a method of treating an immune related disorder in a mammal in need thereof, comprising administering to the mammal an effective amount of a PRO polypeptide, an agonist thereof, or an antagonist thereto. In a preferred aspect, the immune related disorder is selected from the group consisting of: systemic lupus erythematosis, X-linked infantile hypogammaglobulinemia, polysaccaride antigen unresponsiveness, selective IgA deficiency, selective IgM deficiency, selective deficiency of IgG subclasses, immunodeficiency with hyper Ig-M, transient hypogammaglobulinemia of infancy, Burkitt's lymphoma, Intermediate lymphoma, follicular lymphoma, typeII hypersensitivity, rheumatoid arhritis, autoimmune mediated hemolytic anemia, myesthenia gravis, hypoadrenocorticism, glomerulonephritis and ankylosing spondylitis.

[0011] In another embodiment, the invention provides an antibody which specifically binds to any of the above or below described polypeptides. Optionally, the antibody is a monoclonal antibody, humanized antibody, antibody fragment or single-chain antibody. In one aspect, the present invention concerns an isolated antibody which binds a PRO polypeptide. In another aspect, the antibody mimics the activity of a PRO polypeptide (an agonist antibody) or conversely the antibody inhibits or neutralizes the activity of a PRO polypeptide (an antagonist antibody). In another aspect, the antibody is a monoclonal antibody, which preferably has nonhuman complementarity determining region (CDR) residues and human framework region (FR) residues. The antibody may be labeled and may be immobilized on a solid support. In a further aspect, the antibody is an antibody fragment, a monoclonal antibody, a single-chain antibody, or an anti-idiotypic antibody.

[0012] In yet another embodiment, the present invention provides a composition comprising an anti-PRO antibody in admixture with a pharmaceutically acceptable carrier. In one aspect, the composition comprises a therapeutically effective amount of the antibody. Preferably, the composition is sterile. The composition may be administered in the form of a liquid pharmaceutical formulation, which may be preserved to achieve extended storage stability. Alternatively, the antibody is a monoclonal antibody, an antibody fragment, a humanized antibody, or a single-chain antibody.

[0013] In a further embodiment, the invention concerns an article of manufacture, comprising:

[0014] (a) a composition of matter comprising a PRO polypeptide or agonist or antagonist thereof;

[0015] (b) a container containing said composition; and

[0016] (c) a label affixed to said container, or a package insert included in said container referring to the use of said PRO polypeptide or agonist or antagonist thereof in the treatment of an immune related disease. The composition may comprise a therapeutically effective amount of the PRO polypeptide or the agonist or antagonist thereof.

[0017] In yet another embodiment, the present invention concerns a method of diagnosing an immune related disease in a mammal, comprising detecting the level of expression of a gene encoding a PRO polypeptide (a) in a test sample of tissue cells obtained from the mammal, and (b) in a control sample of known normal tissue cells of the same cell type, wherein a higher or lower expression level in the test sample as compared to the control sample indicates the presence of immune related disease in the mammal from which the test tissue cells were obtained.

[0018] In another embodiment, the present invention concerns a method of diagnosing an immune disease in a mammal, comprising (a) contacting an anti-PRO antibody with a test sample of tissue cells obtained from the mammal, and (b) detecting the formation of a complex between the antibody and a PRO polypeptide, in the test sample; wherein the formation of said complex is indicative of the presence or absence of said disease. The detection may be qualitative or quantitative, and may be performed in comparison with monitoring the complex formation in a control sample of known normal tissue cells of the same cell type. A larger quantity of complexes formed in the test sample indicates the presence or absence of an immune disease in the mammal from which the test tissue cells were obtained. The antibody preferably carries a detectable label. Complex formation can be monitored, for example, by light microscopy, flow cytometry, fluorimetry, or other techniques known in the art. The test sample is usually obtained from an individual suspected of having a deficiency or abnormality of the immune system.

[0019] In another embodiment, the invention provides a method for determining the presence of a PRO polypeptide in a sample comprising exposing a test sample of cells suspected of containing the PRO polypeptide to an anti-PRO antibody and determining the binding of said antibody to said cell sample. In a specific aspect, the sample comprises a cell suspected of containing the PRO polypeptide and the antibody binds to the cell. The antibody is preferably detectably labeled and/or bound to a solid support.

[0020] In another embodiment, the present invention concerns an immune-related disease diagnostic kit, comprising an anti-PRO antibody and a carrier in suitable packaging. The kit preferably contains instructions for using the antibody to detect the presence of the PRO polypeptide. Preferably the carrier is pharmaceutically acceptable.

[0021] In another embodiment, the present invention concerns a diagnostic kit, containing an anti-PRO antibody in suitable packaging. The kit preferably contains instructions for using the antibody to detect the PRO polypeptide.

[0022] In another embodiment, the invention provides a method of diagnosing an immune-related disease in a mammal which comprises detecting the presence or absence or a PRO polypeptide in a test sample of tissue cells obtained from said mammal, wherein the presence or absence of the PRO polypeptide in said test sample is indicative of the presence of an immune-related disease in said mammal.

[0023] In another embodiment, the present invention concerns a method for identifying an agonist of a PRO polypeptide comprising:

[0024] (a) contacting cells and a test compound to be screened under conditions suitable for the induction of a cellular response normally induced by a PRO polypeptide; and

[0025] (b) determining the induction of said cellular response to determine if the test compound is an effective agonist, wherein the induction of said cellular response is indicative of said test compound being an effective agonist.

[0026] In another embodiment, the invention concerns a method for identifying a compound capable of inhibiting the activity of a PRO polypeptide comprising contacting a candidate compound with a PRO polypeptide under conditions and for a time sufficient to allow these two components to interact and determining whether the activity of the PRO polypeptide is inhibited. In a specific aspect, either the candidate compound or the PRO polypeptide is immobilized on a solid support. In another aspect, the non-immobilized component carries a detectable label. In a preferred aspect, this method comprises the steps of:

[0027] (a) contacting cells and a test compound to be screened in the presence of a PRO polypeptide under conditions suitable for the induction of a cellular response normally induced by a PRO polypeptide; and

[0028] (b) determining the induction of said cellular response to determine if the test compound is an effective antagonist.

[0029] In another embodiment, the invention provides a method for identifying a compound that inhibits the expression of a PRO polypeptide in cells that normally express the polypeptide, wherein the method comprises contacting the cells with a test compound and determining whether the expression of the PRO polypeptide is inhibited. In a preferred aspect, this method comprises the steps of:

[0030] (a) contacting cells and a test compound to be screened under conditions suitable for allowing expression of the PRO polypeptide; and

[0031] (b) determining the inhibition of expression of said polypeptide.

[0032] In yet another embodiment, the present invention concerns a method for treating an immune-related disorder in a mammal that suffers therefrom comprising administering to the mammal a nucleic acid molecule that codes for either (a) a PRO polypeptide, (b) an agonist of a PRO polypeptide or (c) an antagonist of a PRO polypeptide, wherein said agonist or antagonist may be an anti-PRO antibody. In a preferred embodiment, the mammal is human. In another preferred embodiment, the nucleic acid is administered via ex vivo gene therapy. In a further preferred embodiment, the nucleic acid is comprised within a vector, more preferably an adenoviral, adeno-associated viral, lentiviral or retroviral vector.

[0033] In yet another aspect, the invention provides a recombinant viral particle comprising a viral vector consisting essentially of a promoter, nucleic acid encoding (a) a PRO polypeptide, (b) an agonist polypeptide of a PRO polypeptide, or (c) an antagonist polypeptide of a PRO polypeptide, and a signal sequence for cellular secretion of the polypeptide, wherein the viral vector is in association with viral structural proteins. Preferably, the signal sequence is from a mammal, such as from a native PRO polypeptide.

[0034] In a still further embodiment, the invention concerns an ex vivo producer cell comprising a nucleic acid construct that expresses retroviral structural proteins and also comprises a retroviral vector consisting essentially of a promoter, nucleic acid encoding (a) a PRO polypeptide, (b) an agonist polypeptide of a PRO polypeptide or (c) an antagonist polypeptide of a PRO polypeptide, and a signal sequence for cellular secretion of the polypeptide, wherein said producer cell packages the retroviral vector in association with the structural proteins to produce recombinant retroviral particles.

[0035] In a still further embodiment, the invention provides a method of increasing the activity of B-lymphocytes in a mammal comprising administering to said mammal (a) a PRO polypeptide, (b) an agonist of a PRO polypeptide, or (c) an antagonist of a PRO polypeptide, wherein the activity of B-lymphocytes in the mammal is increased.

[0036] In a still further embodiment, the invention provides a method of decreasing the activity of B-lymphocytes in a mammal comprising administering to said mammal (a) a PRO polypeptide, (b) an agonist of a PRO polypeptide, or (c) an antagonist of a PRO polypeptide, wherein the activity of B-lymphocytes in the mammal is decreased.

[0037] In a still further embodiment, the invention provides a method of increasing the proliferation of B-lymphocytes in a mammal comprising administering to said mammal (a) a PRO polypeptide, (b) an agonist of a PRO polypeptide, or (c) an antagonist of a PRO polypeptide, wherein the proliferation of B-lymphocytes in the mammal is increased.

[0038] In a still further embodiment the invention provides a method of decreasing the proliferation of B-lymphocytes in a mammal comprising administering to said mammal (a) a PRO polypeptide, (b) an agonist of a PRO polypeptide, or (c) an antagonist of a PRO polypeptide, wherein the proliferation of B-lymphocytes in the mammal is decreased.

[0039] B. Additional Embodiments

[0040] In other embodiments of the present invention, the invention provides vectors comprising DNA encoding any of the herein described polypeptides. Host cell comprising any such vector are also provided. By way of example, the host cells may be CHO cells, E. coli, or yeast. A process for producing any of the herein described polypeptides is further provided and comprises culturing host cells under conditions suitable for expression of the desired polypeptide and recovering the desired polypeptide from the cell culture.

[0041] In other embodiments, the invention provides chimeric molecules comprising any of the herein described polypeptides fused to a heterologous polypeptide or amino acid sequence. Example of such chimeric molecules comprise any of the herein described polypeptides fused to an epitope tag sequence or a Fc region of an immunoglobulin.

[0042] In another embodiment, the invention provides an antibody which specifically binds to any of the above or below described polypeptides. Optionally, the antibody is a monoclonal antibody, humanized antibody, antibody fragment or single-chain antibody.

[0043] In yet other embodiments, the invention provides oligonucleotide probes useful for isolating genomic and cDNA nucleotide sequences or as antisense probes, wherein those probes may be derived from any of the above or below described nucleotide sequences.

[0044] In other embodiments, the invention provides an isolated nucleic acid molecule comprising a nucleotide sequence that encodes a PRO polypeptide.

[0045] In one aspect, the isolated nucleic acid molecule comprises a nucleotide sequence having at least about 80% nucleic acid sequence identity, alternatively at least about 81% nucleic acid sequence identity, alternatively at least about 82% nucleic acid sequence identity, alternatively at least about 83% nucleic acid sequence identity, alternatively at least about 84% nucleic acid sequence identity, alternatively at least about 85% nucleic acid sequence identity, alternatively at least about 86% nucleic acid sequence identity, alternatively at least about 87% nucleic acid sequence identity, alternatively at least about 88% nucleic acid sequence identity, alternatively at least about 89% nucleic acid sequence identity, alternatively at least about 90% nucleic acid sequence identity, alternatively at least about 91% nucleic acid sequence identity, alternatively at least about 92% nucleic acid sequence identity, alternatively at least about 93% nucleic acid sequence identity, alternatively at least about 94% nucleic acid sequence identity, alternatively at least about 95% nucleic acid sequence identity, alternatively at least about 96% nucleic acid sequence identity, alternatively at least about 97% nucleic acid sequence identity, alternatively at least about 98% nucleic acid sequence identity and alternatively at least about 99% nucleic acid sequence identity to (a) a DNA molecule encoding a PRO polypeptide having a full-length amino acid sequence as disclosed herein, an amino acid sequence lacking the signal peptide as disclosed herein, an extracellular domain of a transmembrane protein, with or without the signal peptide, as disclosed herein or any other specifically defined fragment of the full-length amino acid sequence as disclosed herein, or (b) the complement of the DNA molecule of (a).

[0046] In other aspects, the isolated nucleic acid molecule comprises a nucleotide sequence having at least about 80% nucleic acid sequence identity, alternatively at least about 81% nucleic acid sequence identity, alternatively at least about 82% nucleic acid sequence identity, alternatively at least about 83% nucleic acid sequence identity, alternatively at least about 84% nucleic acid sequence identity, alternatively at least about 85% nucleic acid sequence identity, alternatively at least about 86% nucleic acid sequence identity, alternatively at least about 87% nucleic acid sequence identity, alternatively at least about 88% nucleic acid sequence identity, alternatively at least about 89% nucleic acid sequence identity, alternatively at least about 90% nucleic acid sequence identity, alternatively at least about 91% nucleic acid sequence identity, alternatively at least about 92% nucleic acid sequence identity, alternatively at least about 93% nucleic acid sequence identity, alternatively at least about 94% nucleic acid sequence identity, alternatively at least about 95% nucleic acid sequence identity, alternatively at least about 96% nucleic acid sequence identity, alternatively at least about 97% nucleic acid sequence identity, alternatively at least about 98% nucleic acid sequence identity and alternatively at least about 99% nucleic acid sequence identity to (a) a DNA molecule comprising the coding sequence of a full-length PRO polypeptide cDNA as disclosed herein, the coding sequence of a PRO polypeptide lacking the signal peptide as disclosed herein, the coding sequence of an extracellular domain of a transmembrane PRO polypeptide, with or without the signal peptide, as disclosed herein or the coding sequence of any other specifically defined fragment of the full-length amino acid sequence as disclosed herein, or (b) the complement of the DNA molecule of (a).

[0047] In a further aspect, the invention concerns an isolated nucleic acid molecule comprising a nucleotide sequence having at least about 80% nucleic acid sequence identity, alternatively at least about 81% nucleic acid sequence identity, alternatively at least about 82% nucleic acid sequence identity, alternatively at least about 83% nucleic acid sequence identity, alternatively at least about 84% nucleic acid sequence identity, alternatively at least about 85% nucleic acid sequence identity, alternatively at least about 86% nucleic acid sequence identity, alternatively at least about 87% nucleic acid sequence identity, alternatively at least about 88% nucleic acid sequence identity, alternatively at least about 89% nucleic acid sequence identity, alternatively at least about 90% nucleic acid sequence identity, alternatively at least about 91% nucleic acid sequence identity, alternatively at least about 92% nucleic acid sequence identity, alternatively at least about 93% nucleic acid sequence identity, alternatively at least about 94% nucleic acid sequence identity, alternatively at least about 95% nucleic acid sequence identity, alternatively at least about 96% nucleic acid sequence identity, alternatively at least about 97% nucleic acid sequence identity, alternatively at least about 98% nucleic acid sequence identity and alternatively at least about 99% nucleic acid sequence identity to (a) a DNA molecule that encodes the same mature polypeptide encoded by any of the human protein cDNAs as disclosed herein, or (b) the complement of the DNA molecule of (a).

[0048] Another aspect the invention provides an isolated nucleic acid molecule comprising a nucleotide sequence encoding a PRO polypeptide which is either transmembrane domain-deleted or transmembrane domain-inactivated, or is complementary to such encoding nucleotide sequence, wherein the transmembrane domain(s) of such polypeptide are disclosed herein. Therefore, soluble extracellular domains of the herein described PRO polypeptides are contemplated.

[0049] Another embodiment is directed to fragments of a PRO polypeptide coding sequence, or the complement thereof, that may find use as, for example, hybridization probes, for encoding fragments of a PRO polypeptide that may optionally encode a polypeptide comprising a binding site for an anti-PRO antibody or as antisense oligonucleotide probes. Such nucleic acid fragments are usually at least about 20 nucleotides in length, alternatively at least about 30 nucleotides in length, alternatively at least about 40 nucleotides in length, alternatively at least about 50 nucleotides in length, alternatively at least about 60 nucleotides in length, alternatively at least about 70 nucleotides in length, alternatively at least about 80 nucleotides in length, alternatively at least about 90 nucleotides in length, alternatively at least about 100 nucleotides in length, alternatively at least about 110 nucleotides in length, alternatively at least about 120 nucleotides in length, alternatively at least about 130 nucleotides in length, alternatively at least about 140 nucleotides in length, alternatively at least about 150 nucleotides in length, alternatively at least about 160 nucleotides in length, alternatively at least about 170 nucleotides in length, alternatively at least about 180 nucleotides in length, alternatively at least about 190 nucleotides in length, alternatively at least about 200 nucleotides in length, alternatively at least about 250 nucleotides in length, alternatively at least about 300 nucleotides in length, alternatively at least about 350 nucleotides in length, alternatively at least about 400 nucleotides in length, alternatively at least about 450 nucleotides in length, alternatively at least about 500 nucleotides in length, alternatively at least about 600 nucleotides in length, alternatively at least about 700 nucleotides in length, alternatively at least about 800 nucleotides in length, alternatively at least about 900 nucleotides in length and alternatively at least about 1000 nucleotides in length, wherein in this context the term “about” means the referenced nucleotide sequence length plus or minus 10% of that referenced length. It is noted that novel fragments of a PRO polypeptide-encoding nucleotide sequence may be determined in a routine manner by aligning the PRO polypeptide-encoding nucleotide sequence with other known nucleotide sequences using any of a number of well known sequence alignment programs and determining which PRO polypeptide-encoding nucleotide sequence fragment(s) are novel. All of such PRO polypeptide-encoding nucleotide sequences are contemplated herein. Also contemplated are the PRO polypeptide fragments encoded by these nucleotide molecule fragments, preferably those PRO polypeptide fragments that comprise a binding site for an anti-PRO antibody.

[0050] In another embodiment, the invention provides isolated PRO polypeptide encoded by any of the isolated nucleic acid sequences herein above identified.

[0051] In a certain aspect, the invention concerns an isolated PRO polypeptide, comprising an amino acid sequence having at least about 80% amino acid sequence identity, alternatively at least about 81% amino acid sequence identity, alternatively at least about 82% amino acid sequence identity, alternatively at least about 83% amino acid sequence identity, alternatively at least about 84% amino acid sequence identity, alternatively at least about 85% amino acid sequence identity, alternatively at least about 86% amino acid sequence identity, alternatively at least about 87% amino acid sequence identity, alternatively at least about 88% amino acid sequence identity, alternatively at least about 89% amino acid sequence identity, alternatively at least about 90% amino acid sequence identity, alternatively at least about 91% amino acid sequence identity, alternatively at least about 92% amino acid sequence identity, alternatively at least about 93% amino acid sequence identity, alternatively at least about 94% amino acid sequence identity, alternatively at least about 95% amino acid sequence identity, alternatively at least about 96% amino acid sequence identity, alternatively at least about 97% amino acid sequence identity, alternatively at least about 98% amino acid sequence identity and alternatively at least about 99% amino acid sequence identity to a PRO polypeptide having a full-length amino acid sequence as disclosed herein, an amino acid sequence lacking the signal peptide as disclosed herein, an extracellular domain of a transmembrane protein, with or without the signal peptide, as disclosed herein or any other specifically defined fragment of the full-length amino acid sequence as disclosed herein.

[0052] In a further aspect, the invention concerns an isolated PRO polypeptide comprising an amino acid sequence having at least about 80% amino acid sequence identity, alternatively at least about 81% amino acid sequence identity, alternatively at least about 82% amino acid sequence identity, alternatively at least about 83% amino acid sequence identity, alternatively at least about 84% amino acid sequence identity, alternatively at least about 85% amino acid sequence identity, alternatively at least about 86% amino acid sequence identity, alternatively at least about 87% amino acid sequence identity, alternatively at least about 88% amino acid sequence identity, alternatively at least about 89% amino acid sequence identity, alternatively at least about 90% amino acid sequence identity, alternatively at least about 91% amino acid sequence identity, alternatively at least about 92% amino acid sequence identity, alternatively at least about 93% amino acid sequence identity, alternatively at least about 94% amino acid sequence identity, alternatively at least about 95% amino acid sequence identity, alternatively at least about 96% amino acid sequence identity, alternatively at least about 97% amino acid sequence identity, alternatively at least about 98% amino acid sequence identity and alternatively at least about 99% amino acid sequence identity to an amino acid sequence encoded by any of the human protein cDNAs as disclosed herein.

[0053] In a specific aspect, the invention provides an isolated PRO polypeptide without the N-terminal signal sequence and/or the initiating methionine and is encoded by a nucleotide sequence that encodes such an amino acid sequence as herein before described. Processes for producing the same are also herein described, wherein those processes comprise culturing a host cell comprising a vector which comprises the appropriate encoding nucleic acid molecule under conditions suitable for expression of the PRO polypeptide and recovering the PRO polypeptide from the cell culture.

[0054] Another aspect the invention provides an isolated PRO polypeptide which is either transmembrane domain-deleted or transmembrane domain-inactivated. Processes for producing the same are also herein described, wherein those processes comprise culturing a host cell comprising a vector which comprises the appropriate encoding nucleic acid molecule under conditions suitable for expression of the PRO polypeptide and recovering the PRO polypeptide from the cell culture.

[0055] In yet another embodiment, the invention concerns agonists and antagonists of a native PRO polypeptide as defined herein. In a particular embodiment, the agonist or antagonist is an anti-PRO antibody or a small molecule.

[0056] In a further embodiment, the invention concerns a method of identifying agonists or antagonists to a PRO polypeptide which comprise contacting the PRO polypeptide with a candidate molecule and monitoring a biological activity mediated by said PRO polypeptide. Preferably, the PRO polypeptide is a native PRO polypeptide.

[0057] In a still further embodiment, the invention concerns a composition of matter comprising a PRO polypeptide, or an agonist or antagonist of a PRO polypeptide as herein described, or an anti-PRO antibody, in combination with a carrier. Optionally, the carrier is a pharmaceutically acceptable carrier.

[0058] Another embodiment of the present invention is directed to the use of a PRO polypeptide, or an agonist or antagonist thereof as herein before described, or an anti-PRO antibody, for the preparation of a medicament useful in the treatment of a condition which is responsive to the PRO polypeptide, an agonist or antagonist thereof or an anti-PRO antibody.

### BRIEF DESCRIPTION OF THE DRAWINGS

[0059] FIG. 1 shows a nucleotide sequence (SEQ ID NO:1) of a native sequence cDNA, wherein SEQ ID NO:1 is a clone designated herein as “DNA328999”.

[0060] FIG. 2A-B shows a nucleotide sequence (SEQ ID NO:2) of a native sequence PRO12560 cDNA, wherein SEQ ID NO:2A-B is a clone designated herein as “DNA150956”.

[0061] FIG. 3 shows the amino acid sequence (SEQ ID NO:3) derived from the coding sequence of SEQ ID NO:2 shown in FIG. 2A-B.

[0062] FIG. 4 shows a nucleotide sequence (SEQ ID NO:4) of a native sequence PRO329 cDNA, wherein SEQ ID NO:4 is a clone designated herein as “DNA323978”.

[0063] FIG. 5 shows the amino acid sequence (SEQ ID NO: 5) derived from the coding sequence of SEQ ID NO:4 shown in FIG. 4.

[0064] FIG. 6 shows a nucleotide sequence (SEQ ID NO:6) of a native sequence PRO71236 cDNA, wherein SEQ ID NO:6 is a clone designated herein as “DNA304829”.

[0065] FIG. 7 shows the amino acid sequence (SEQ ID NO:7) derived from the coding sequence of SEQ ID NO:6 shown in FIG. 6.

[0066] FIG. 8 shows a nucleotide sequence (SEQ ID NO:8) of a native sequence PRO1265 cDNA, wherein SEQ ID NO:8 is a clone designated herein as “DNA304827”.

[0067] FIG. 9 shows the amino acid sequence (SEQ ID NO:9) derived from the coding sequence of SEQ ID NO:8 shown in FIG. 8.

[0068] FIG. 10 shows a nucleotide sequence (SEQ ID NO:10) of a native sequence PRO71045 cDNA, wherein SEQ ID NO:10 is a clone designated herein as “DNA304469”.

[0069] FIG. 11 shows the amino acid sequence (SEQ ID NO:11) derived from the coding sequence of SEQ ID NO:10 shown in FIG. 10.

[0070] FIG. 12 shows a nucleotide sequence (SEQ ID NO:12) of a native sequence PRO71049 cDNA, wherein SEQ ID NO:12 is a clone designated herein as “DNA304475”.

[0071] FIG. 13 shows the amino acid sequence (SEQ ID NO:13) derived from the coding sequence of SEQ ID NO:12 shown in FIG. 12.

[0072] FIG. 14 shows a nucleotide sequence (SEQ ID NO:14) of a native sequence PRO37162 cDNA, wherein SEQ ID NO:14 is a clone designated herein as “DNA226699”.

[0073] FIG. 15 shows the amino acid sequence (SEQ ID NO:15) derived from the coding sequence of SEQ ID NO:14 shown in FIG. 14.

[0074] FIG. 16 shows a nucleotide sequence (SEQ ID NO:16) of a native sequence PRO160 cDNA, wherein SEQ ID NO:16 is a clone designated herein as “DNA59763”.

[0075] FIG. 17 shows the amino acid sequence (SEQ ID NO:17) derived from the coding sequence of SEQ ID NO:16 shown in FIG. 16.

[0076] FIG. 18 shows a nucleotide sequence (SEQ ID NO:18) of a native sequence PRO37534 cDNA, wherein SEQ ID NO:18 is a clone designated herein as “DNA227071”.

[0077] FIG. 19 shows the amino acid sequence (SEQ ID NO:19) derived from the coding sequence of SEQ ID NO:18 shown in FIG. 18.

[0078] FIG. 20 shows a nucleotide sequence (SEQ ID NO:20) of a native sequence PRO37544 cDNA, wherein SEQ ID NO:20 is a clone designated herein as “DNA227801”.

[0079] FIG. 21 shows the amino acid sequence (SEQ ID NO:21) derived from the coding sequence of SEQ ID NO:20 shown in FIG. 20.

[0080] FIG. 22 shows a nucleotide sequence (SEQ ID NO:22) of a native sequence PRO21787 cDNA, wherein SEQ ID NO:22 is a clone designated herein as “DNA188293”.

[0081] FIG. 23 shows the amino acid sequence (SEQ ID NO:23) derived from the coding sequence of SEQ ID NO:22 shown in FIG. 22.

[0082] FIG. 24 shows a nucleotide sequence (SEQ ID NO:24) of a native sequence PRO34330 cDNA, wherein SEQ ID NO:24 is a clone designated herein as “DNA218278”.

[0083] FIG. 25 shows the amino acid sequence (SEQ ID NO:25) derived from the coding sequence of SEQ ID NO:24 shown in FIG. 24.

[0084] FIG. 26 shows a nucleotide sequence (SEQ ID NO:26) of a native sequence PRO2540 cDNA, wherein SEQ ID NO:26 is a clone designated herein as “DNA76514”.

[0085] FIG. 27 shows the amino acid sequence (SEQ ID NO:27) derived from the coding sequence of SEQ ID NO:26 shown in FIG. 26.

[0086] FIG. 28 shows a nucleotide sequence (SEQ ID NO:28) of a native sequence PRO7 cDNA, wherein SEQ ID NO:28 is a clone designated herein as “DNA35629”.

[0087] FIG. 29 shows the amino acid sequence (SEQ ID NO:29) derived from the coding sequence of SEQ ID NO:28 shown in FIG. 28.

[0088] FIG. 30 shows a nucleotide sequence (SEQ ID NO:30) of a native sequence PRO34288 cDNA, wherein SEQ ID NO:30 is a clone designated herein as “DNA217246”.

[0089] FIG. 31 shows the amino acid sequence (SEQ ID NO:31) derived from the coding sequence of SEQ ID NO:30 shown in FIG. 30.

[0090] FIG. 32 shows a nucleotide sequence (SEQ ID NO:32) of a native sequence PRO84690 cDNA, wherein SEQ ID NO:32 is a clone designated herein as “DNA329000”.

[0091] FIG. 33 shows the amino acid sequence (SEQ ID NO:33) derived from the coding sequence of SEQ ID NO:32 shown in FIG. 32.

[0092] FIG. 34 shows a nucleotide sequence (SEQ ID NO:34) of a native sequence PRO2134 cDNA, wherein SEQ ID NO:34 is a clone designated herein as “DNA88034”.

[0093] FIG. 35 shows the amino acid sequence (SEQ ID NO:35) derived from the coding sequence of SEQ ID NO:34 shown in FIG. 34.

[0094] FIG. 36A-B shows a nucleotide sequence (SEQ ID NO:36) of a native sequence PRO21928 cDNA, wherein SEQ ID NO:36 is a clone designated herein as “DNA188400”.

[0095] FIG. 37 shows the amino acid sequence (SEQ ID NO:37) derived from the coding sequence of SEQ ID NO:36 shown in FIG. 36A-B.

[0096] FIG. 38 shows a nucleotide sequence (SEQ ID NO:38) of a native sequence PRO23974 cDNA, wherein SEQ ID NO:38 is a clone designated herein as “DNA194652”.

[0097] FIG. 39 shows the amino acid sequence (SEQ ID NO:39) derived from the coding sequence of SEQ ID NO:38 shown in FIG. 38.

[0098] FIG. 40 shows a nucleotide sequence (SEQ ID NO:40) of a native sequence PRO34457 cDNA, wherein SEQ ID NO:40 is a clone designated herein as “DNA328555”.

[0099] FIG. 41 shows the amino acid sequence (SEQ ID NO:41) derived from the coding sequence of SEQ ID NO:40 shown in FIG. 40.

[0100] FIG. 42 shows a nucleotide sequence (SEQ ID NO:42) of a native sequence PRO37158 cDNA, wherein SEQ ID NO:42 is a clone designated herein as “DNA226695”.

[0101] FIG. 43 shows the amino acid sequence (SEQ ID NO:43) derived from the coding sequence of SEQ ID NO:42 shown in FIG. 42.

[0102] FIG. 44A-B shows a nucleotide sequence (SEQ ID NO:44) of a native sequence PRO2537 cDNA, wherein SEQ ID NO:44 is a clone designated herein as “DNA76504”.

[0103] FIG. 45 shows the amino acid sequence (SEQ ID NO:45) derived from the coding sequence of SEQ ID NO:44 shown in FIG. 44A-B.

[0104] FIG. 46A-B shows a nucleotide sequence (SEQ ID NO:46) of a native sequence PRO36827 cDNA, wherein SEQ ID NO:46 is a clone designated herein as “DNA226364”.

[0105] FIG. 47 shows the amino acid sequence (SEQ ID NO:47) derived from the coding sequence of SEQ ID NO:46 shown in FIG. 46.

[0106] FIG. 48 shows a nucleotide sequence (SEQ ID NO:48) of a native sequence PRO26296 cDNA, wherein SEQ ID NO:48 is a clone designated herein as “DNA329001”.

[0107] FIG. 49 shows the amino acid sequence (SEQ ID NO:49) derived from the coding sequence of SEQ ID NO:48 shown in FIG. 48.

[0108] FIG. 50A-B shows a nucleotide sequence (SEQ ID NO:50) of a native sequence PRO36766 cDNA, wherein SEQ ID NO:50 is a clone designated herein as “DNA287217”.

[0109] FIG. 51 shows the amino acid sequence (SEQ ID NO:51) derived from the coding sequence of SEQ ID NO:50 shown in FIG. 50A-B.

[0110] FIG. 52 shows a nucleotide sequence (SEQ ID NO:52) of a native sequence PRO4912 cDNA, wherein SEQ ID NO:52 is a clone designated herein as “DNA329002”.

[0111] FIG. 53 shows the amino acid sequence (SEQ ID NO:53) derived from the coding sequence of SEQ ID NO:52 shown in FIG. 52.

[0112] FIG. 54 shows a nucleotide sequence (SEQ ID NO:54) of a native sequence PRO4769 cDNA, wherein SEQ ID NO:54 is a clone designated herein as “DNA328387”.

[0113] FIG. 55 shows the amino acid sequence (SEQ ID NO:55) derived from the coding sequence of SEQ ID NO:54 shown in FIG. 54.

[0114] FIG. 56 shows a nucleotide sequence (SEQ ID NO:56) of a native sequence PRO36899 cDNA, wherein SEQ ID NO:56 is a clone designated herein as “DNA226436”.

[0115] FIG. 57 shows the amino acid sequence (SEQ ID NO:57) derived from the coding sequence of SEQ ID NO:56 shown in FIG. 56.

[0116] FIG. 58 shows a nucleotide sequence (SEQ ID NO:58) of a native sequence PRO33667 cDNA, wherein SEQ ID NO:58 is a clone designated herein as “DNA210121”.

[0117] FIG. 59 shows the amino acid sequence (SEQ ID NO:59) derived from the coding sequence of SEQ ID NO:58 shown in FIG. 58.

[0118] FIG. 60 shows a nucleotide sequence (SEQ ID NO:60) of a native sequence PRO37695 cDNA, wherein SEQ ID NO:60 is a clone designated herein as “DNA227232”.

[0119] FIG. 61 shows the amino acid sequence (SEQ ID NO:61) derived from the coding sequence of SEQ ID NO:60 shown in FIG. 60.

[0120] FIG. 62 shows a nucleotide sequence (SEQ ID NO:62) of a native sequence PRO38069 cDNA, wherein SEQ ID NO:62 is a clone designated herein as “DNA227606”.

[0121] FIG. 63 shows the amino acid sequence (SEQ ID NO:63) derived from the coding sequence of SEQ ID NO:62 shown in FIG. 62.

[0122] FIG. 64 shows a nucleotide sequence (SEQ ID NO:64) of a native sequence PRO21716 cDNA, wherein SEQ ID NO:64 is a clone designated herein as “DNA188204”.

[0123] FIG. 65 shows the amino acid sequence (SEQ ID NO:65) derived from the coding sequence of SEQ ID NO:64 shown in FIG. 64.

[0124] FIG. 66 shows a nucleotide sequence (SEQ ID NO:66) of a native sequence PRO36124 cDNA, wherein SEQ ID NO:66 is a clone designated herein as “DNA225661”.

[0125] FIG. 67 shows the amino acid sequence (SEQ ID NO:67) derived from the coding sequence of SEQ ID NO:66 shown in FIG. 66.

[0126] FIG. 68 shows a nucleotide sequence (SEQ ID NO:68) of a native sequence PRO77694 cDNA, wherein SEQ ID NO:68 is a clone designated herein as “DNA329003”.

[0127] FIG. 69 shows the amino acid sequence (SEQ ID NO:69) derived from the coding sequence of SEQ ID NO:68 shown in FIG. 68.

[0128] FIG. 70 shows a nucleotide sequence (SEQ ID NO:70) of a native sequence PRO37957 cDNA, wherein SEQ ID NO:70 is a clone designated herein as “DNA227494”.

[0129] FIG. 71 shows the amino acid sequence (SEQ ID NO:71) derived from the coding sequence of SEQ ID NO:70 shown in FIG. 70.

[0130] FIG. 72A-B shows a nucleotide sequence (SEQ ID NO:72) of a native sequence PRO25114 cDNA, wherein SEQ ID NO:72 is a clone designated herein as “DNA196641”.

[0131] FIG. 73 shows the amino acid sequence (SEQ ID NO:73) derived from the coding sequence of SEQ ID NO:72 shown in FIG. 72A-B.

[0132] FIG. 74 shows a nucleotide sequence (SEQ ID NO:74) of a native sequence PRO37553 cDNA, wherein SEQ ID NO:74 is a clone designated herein as “DNA227090”.

[0133] FIG. 75 shows the amino acid sequence (SEQ ID NO:75) derived from the coding sequence of SEQ ID NO:74 shown in FIG. 74.

[0134] FIG. 76 shows a nucleotide sequence (SEQ ID NO:76) of a native sequence PRO81979 cDNA, wherein SEQ ID NO:76 is a clone designated herein as “DNA329004”.

[0135] FIG. 77 shows the amino acid sequence (SEQ ID NO:77) derived from the coding sequence of SEQ ID NO:76 shown in FIG. 76.

[0136] FIG. 78 shows a nucleotide sequence (SEQ ID NO:78) of a native sequence PRO6013 cDNA, wherein SEQ ID NO:78 is a clone designated herein as “DNA304828”.

[0137] FIG. 79 shows the amino acid sequence (SEQ ID NO:79) derived from the coding sequence of SEQ ID NO:79 shown in FIG. 78.

[0138] FIG. 80 shows a nucleotide sequence (SEQ ID NO:80) of a native sequence PRO21960 cDNA, wherein SEQ ID NO:80 is a clone designated herein as “DNA192060”.

[0139] FIG. 81 shows the amino acid sequence (SEQ ID NO:81) derived from the coding sequence of SEQ ID NO:80 shown in FIG. 80.

[0140] FIG. 82 shows a nucleotide sequence (SEQ ID NO:82) of a native sequence PRO34276 cDNA, wherein SEQ ID NO:82 is a clone designated herein as “DNA216689”.

[0141] FIG. 83 shows the amino acid sequence (SEQ ID NO:83) derived from the coding sequence of SEQ ID NO:82 shown in FIG. 82.

[0142] FIG. 84 shows a nucleotide sequence (SEQ ID NO:84) of a native sequence PRO1717 cDNA, wherein SEQ ID NO:84 is a clone designated herein as “DNA82342”.

[0143] FIG. 85 shows the amino acid sequence (SEQ ID NO:85) derived from the coding sequence of SEQ ID NO:84 shown in FIG. 84.

[0144] FIG. 86 shows a nucleotide sequence (SEQ ID NO:86) of a native sequence PRO34107 cDNA, wherein SEQ ID NO:86 is a clone designated herein as “DNA199788”.

[0145] FIG. 87 shows the amino acid sequence (SEQ ID NO:87) derived from the coding sequence of SEQ ID NO:86 shown in FIG. 86.

[0146] FIG. 88 shows a nucleotide sequence (SEQ ID NO:88) of a native sequence PRO12612 cDNA, wherein SEQ ID NO:88 is a clone designated herein as “DNA329005”.

[0147] FIG. 89 shows the amino acid sequence (SEQ ID NO:89) derived from the coding sequence of SEQ ID NO:88 shown in FIG. 88.

[0148] FIG. 90 shows a nucleotide sequence (SEQ ID NO:90) of a native sequence PRO37946 cDNA, wherein SEQ ID NO:90 is a clone designated herein as “DNA227483”.

[0149] FIG. 91 shows the amino acid sequence (SEQ ID NO:91) derived from the coding sequence of SEQ ID NO:90 shown in FIG. 90.

[0150] FIG. 92 shows a nucleotide sequence (SEQ ID NO:92) of a native sequence PRO12865 cDNA, wherein SEQ ID NO:92 is a clone designated herein as “DNA329006”.

[0151] FIG. 93 shows the amino acid sequence (SEQ ID NO:93) derived from the coding sequence of SEQ ID NO:92 shown in FIG. 92.

[0152] FIG. 94A-B shows a nucleotide sequence (SEQ ID NO:94) of a native sequence PRO37029 cDNA, wherein SEQ ID NO:94 is a clone designated herein as “DNA329007”.

[0153] FIG. 95 shows the amino acid sequence (SEQ ID NO:95) derived from the coding sequence of SEQ ID NO:94 shown in FIG. 94A-B.

[0154] FIG. 96 shows a nucleotide sequence (SEQ ID NO:96) of a native sequence PRO38337 cDNA, wherein SEQ ID NO:96 is a clone designated herein as “DNA227874”.

[0155] FIG. 97 shows the amino acid sequence (SEQ ID NO:97) derived from the coding sequence of SEQ ID NO:96 shown in FIG. 96.

[0156] FIG. 98 shows a nucleotide sequence (SEQ ID NO:98) of a native sequence PRO4710 cDNA, wherein SEQ ID NO:98 is a clone designated herein as “DNA103380”.

[0157] FIG. 99 shows the amino acid sequence (SEQ ID NO:99) derived from the coding sequence of SEQ ID NO:98 shown in FIG. 98.

[0158] FIG. 100 shows a nucleotide sequence (SEQ ID NO:100) of a native sequence PRO12570 cDNA, wherein SEQ ID NO:100 is a clone designated herein as “DNA 150990”.

[0159] FIG. 101 shows the amino acid sequence (SEQ ID NO:101) derived from the coding sequence of SEQ ID NO:100 shown in FIG. 100.

[0160] FIG. 102 shows a nucleotide sequence (SEQ ID NO:102) of a native sequence PRO12890 cDNA, wherein SEQ ID NO:102 is a clone designated herein as “DNA 151802”.

[0161] FIG. 103 shows the amino acid sequence (SEQ ID NO:103) derived from the coding sequence of SEQ ID NO:102 shown in FIG. 102.

[0162] FIG. 104 shows a nucleotide sequence (SEQ ID NO:104) of a native sequence PRO37121 cDNA, wherein SEQ ID NO:104 is a clone designated herein as “DNA226658”.

[0163] FIG. 105 shows the amino acid sequence (SEQ ID NO:105) derived from the coding sequence of SEQ ID NO:104 shown in FIG. 104.

[0164] FIG. 106 shows a nucleotide sequence (SEQ ID NO:106) of a native sequence PRO3813 cDNA, wherein SEQ ID NO:106 is a clone designated herein as “DNA196579”.

[0165] FIG. 107 shows the amino acid sequence (SEQ ID NO:107) derived from the coding sequence of SEQ ID NO:106 shown in FIG. 106.

[0166] FIG. 108 shows a nucleotide sequence (SEQ ID NO:108) of a native sequence PRO24934 cDNA, wherein SEQ ID NO:108 is a clone designated herein as “DNA196439”.

[0167] FIG. 109 shows the amino acid sequence (SEQ ID NO:109) derived from the coding sequence of SEQ ID NO:108 shown in FIG. 108.

[0168] FIG. 110A-B shows a nucleotide sequence (SEQ ID NO:110) of a native sequence PRO12458 cDNA, wherein SEQ ID NO:110 is a clone designated herein as “DNA150765”.

[0169] FIG. 111 shows the amino acid sequence (SEQ ID NO:111) derived from the coding sequence of SEQ ID NO:110 shown in FIG. 110A-B.

[0170] FIG. 112 shows a nucleotide sequence (SEQ ID NO:112) of a native sequence PRO37843 cDNA, wherein SEQ ID NO:112 is a clone designated herein as “DNA328570”.

[0171] FIG. 113 shows the amino acid sequence (SEQ ID NO:113) derived from the coding sequence of SEQ ID NO:112 shown in FIG. 112.

[0172] FIG. 114 A-B shows a nucleotide sequence (SEQ ID NO:114) of a native sequence PRO37547 cDNA, wherein SEQ ID NO:114 is a clone designated herein as “DNA227084”.

[0173] FIG. 115 shows the amino acid sequence (SEQ ID NO:115) derived from the coding sequence of SEQ ID NO:114 shown in FIG. 114A-B.

[0174] FIG. 116 shows a nucleotide sequence (SEQ ID NO:116) of a native sequence PRO36300 cDNA, wherein SEQ ID NO:116 is a clone designated herein as “DNA225837”.

[0175] FIG. 117 shows the amino acid sequence (SEQ ID NO:117) derived from the coding sequence of SEQ ID NO:116 shown in FIG. 116.

[0176] FIG. 118 shows a nucleotide sequence (SEQ ID NO:118) of a native sequence PRO37192 cDNA, wherein SEQ ID NO:118 is a clone designated herein as “DNA226729”.

[0177] FIG. 119 shows the amino acid sequence (SEQ ID NO:119) derived from the coding sequence of SEQ ID NO:118 shown in FIG. 118.

[0178] FIG. 120 shows a nucleotide sequence (SEQ ID NO:120) of a native sequence PRO12832 cDNA, wherein SEQ ID NO:120 is a clone designated herein as “DNA329008”.

[0179] FIG. 121 shows the amino acid sequence (SEQ ID NO:121) derived from the coding sequence of SEQ ID NO:120 shown in FIG. 120.

[0180] FIG. 122A-B shows a nucleotide sequence (SEQ ID NO:122) of a native sequence PRO25147 cDNA, wherein SEQ ID NO:122 is a clone designated herein as “DNA196681”.

[0181] FIG. 123 shows the amino acid sequence (SEQ ID NO:123) derived from the coding sequence of SEQ ID NO:122 shown in FIG. 122A-B.

[0182] FIG. 124A-B shows a nucleotide sequence (SEQ ID NO:124) of a native sequence PRO12876 cDNA, wherein SEQ ID NO:124 is a clone designated herein as “DNA1 51420”.

[0183] FIG. 125 shows the amino acid sequence (SEQ ID NO:125) derived from the coding sequence of SEQ ID NO:124 shown in FIG. 124A-B.

[0184] FIG. 126 shows a nucleotide sequence (SEQ ID NO:126) of a native sequence PRO12155 cDNA, wherein SEQ ID NO:126 is a clone designated herein as “DNA150935”.

[0185] FIG. 127 shows the amino acid sequence (SEQ ID NO:127) derived from the coding sequence of SEQ ID NO:126 shown in FIG. 126.

[0186] FIG. 128A-B shows a nucleotide sequence (SEQ ID NO:128) of a native sequence PRO12370 cDNA, wherein SEQ ID NO:128 is a clone designated herein as “DNA150614”.

[0187] FIG. 129 shows the amino acid sequence (SEQ ID NO:129) derived from the coding sequence of SEQ ID NO:128 shown in FIG. 128A-B.

[0188] FIG. 130 shows a nucleotide sequence (SEQ ID NO:130) of a native sequence PRO12320 cDNA, wherein SEQ ID NO:130 is a clone designated herein as “DNA329009”.

[0189] FIG. 131 shows the amino acid sequence (SEQ ID NO:131) derived from the coding sequence of SEQ ID NO:130 shown in FIG. 130.

[0190] FIG. 132 shows a nucleotide sequence (SEQ ID NO:132) of a native sequence PRO23370 cDNA, wherein SEQ ID NO:132 is a clone designated herein as “DNA329010”.

[0191] FIG. 133 shows the amino acid sequence (SEQ ID NO:133) derived from the coding sequence of SEQ ID NO:132 shown in FIG. 132.

[0192] FIG. 134 shows a nucleotide sequence (SEQ ID NO:134) of a native sequence PRO25266 cDNA, wherein SEQ ID NO:134 is a clone designated herein as “DNA196825”.

[0193] FIG. 135 shows the amino acid sequence (SEQ ID NO:135) derived from the coding sequence of SEQ ID NO:134 shown in FIG. 134.

[0194] FIG. 136 shows a nucleotide sequence (SEQ ID NO:136) of a native sequence PRO4785 cDNA, wherein SEQ ID NO:136 is a clone designated herein as “DNA329011”.

[0195] FIG. 137 shows the amino acid sequence (SEQ ID NO:137) derived from the coding sequence of SEQ ID NO:136 shown in FIG. 136.

[0196] FIG. 138 shows a nucleotide sequence (SEQ ID NO:138) of a native sequence PRO4660 cDNA, wherein SEQ ID NO:138 is a clone designated herein as “DNA329012”.

[0197] FIG. 139 shows the amino acid sequence (SEQ ID NO:139) derived from the coding sequence of SEQ ID NO:138 shown in FIG. 138.

[0198] FIG. 140 shows a nucleotide sequence (SEQ ID NO:140) of a native sequence PRO71095 cDNA, wherein SEQ ID NO:140 is a clone designated herein as “DNA340668”.

[0199] FIG. 141 shows the amino acid sequence (SEQ ID NO:141) derived from the coding sequence of SEQ ID NO:140 shown in FIG. 140.

[0200] FIG. 142 shows a nucleotide sequence (SEQ ID NO:142) of a native sequence PRO4658 cDNA, wherein SEQ ID NO:142 is a clone designated herein as “DNA103328”.

[0201] FIG. 143 shows the amino acid sequence (SEQ ID NO:143) derived from the coding sequence of SEQ ID NO:142 shown in FIG. 142.

[0202] FIG. 144A-B shows a nucleotide sequence (SEQ ID NO:144) of a native sequence PRO2757 cDNA, wherein SEQ ID NO:144 is a clone designated herein as “DNA88348”.

[0203] FIG. 145 shows the amino acid sequence (SEQ ID NO:145) derived from the coding sequence of SEQ ID NO:112 shown in FIG. 112.

[0204] FIG. 146 shows a nucleotide sequence (SEQ ID NO:146) of a native sequence PRO12789 cDNA, wherein SEQ ID NO:146 is a clone designated herein as “DNA150710”.

[0205] FIG. 147 shows the amino acid sequence (SEQ ID NO:147) derived from the coding sequence of SEQ ID NO:146 shown in FIG. 146.

[0206] FIG. 148 shows a nucleotide sequence (SEQ ID NO:148) of a native sequence PRO20128 cDNA, wherein SEQ ID NO:148 is a clone designated herein as “DNA329013”.

[0207] FIG. 149 shows the amino acid sequence (SEQ ID NO:149) derived from the coding sequence of SEQ ID NO:148 shown in FIG. 148.

[0208] FIG. 150 shows a nucleotide sequence (SEQ ID NO:150) of a native sequence PRO2834 cDNA, wherein SEQ ID NO:150 is a clone designated herein as “DNA88541”.

[0209] FIG. 151 shows the amino acid sequence (SEQ ID NO:151) derived from the coding sequence of SEQ ID NO:150 shown in FIG. 150.

[0210] FIG. 152 shows a nucleotide sequence (SEQ ID NO:152) of a native sequence PRO9998 cDNA, wherein SEQ ID NO:152 is a clone designated herein as “DNA329014”.

[0211] FIG. 153 shows the amino acid sequence (SEQ ID NO:153) derived from the coding sequence of SEQ ID NO:152 shown in FIG. 152.

[0212] FIG. 154 shows a nucleotide sequence (SEQ ID NO:154) of a native sequence PRO84691 cDNA, wherein SEQ ID NO:154 is a clone designated herein as “DNA329015”.

[0213] FIG. 155 shows the amino acid sequence (SEQ ID NO:155) derived from the coding sequence of SEQ ID NO:154 shown in FIG. 154.

[0214] FIG. 156A-B shows a nucleotide sequence (SEQ ID NO:156) of a native sequence PRO12904 cDNA, wherein SEQ ID NO:156 is a clone designated herein as “DNA151841”.

[0215] FIG. 157 shows the amino acid sequence (SEQ ID NO:157) derived from the coding sequence of SEQ ID NO:156 shown in FIG. 156A-B.

[0216] FIG. 158 shows a nucleotide sequence (SEQ ID NO:158) of a native sequence PRO4887 cDNA, wherein SEQ ID NO:158 is a clone designated herein as “DNA329016”.

[0217] FIG. 159 shows the amino acid sequence (SEQ ID NO:159) derived from the coding sequence of SEQ ID NO:158 shown in FIG. 158.

[0218] FIG. 160 shows a nucleotide sequence (SEQ ID NO:160) of a native sequence PRO12082 cDNA, wherein SEQ ID NO:160 is a clone designated herein as “DNA 150713”.

[0219] FIG. 161 shows the amino acid sequence (SEQ ID NO:161) derived from the coding sequence of SEQ ID NO:160 shown in FIG. 160.

[0220] FIG. 162 shows a nucleotide sequence (SEQ ID NO:162) of a native sequence PRO37975 cDNA, wherein SEQ ID NO:162 is a clone designated herein as “DNA227512”.

[0221] FIG. 163 shows the amino acid sequence (SEQ ID NO:163) derived from the coding sequence of SEQ ID NO:162 shown in FIG. 162.

[0222] FIG. 164 shows a nucleotide sequence (SEQ ID NO:164) of a native sequence PRO37653 cDNA, wherein SEQ ID NO:164 is a clone designated herein as “DNA227190”.

[0223] FIG. 165 shows the amino acid sequence (SEQ ID NO:165) derived from the coding sequence of SEQ ID NO:164 shown in FIG. 164.

[0224] FIG. 166A-B shows a nucleotide sequence (SEQ ID NO:166) of a native sequence PRO4776 cDNA, wherein SEQ ID NO:166 is a clone designated herein as “DNA103449”.

[0225] FIG. 167 shows the amino acid sequence (SEQ ID NO:167) derived from the coding sequence of SEQ ID NO:166 shown in FIG. 166A-B.

[0226] FIG. 168A-B shows a nucleotide sequence (SEQ ID NO:168) of a native sequence PRO12073 cDNA, wherein SEQ ID NO:168 is a clone designated herein as “DNA150498”.

[0227] FIG. 169 shows the amino acid sequence (SEQ ID NO:169) derived from the coding sequence of SEQ ID NO:168 shown in FIG. 168A-B.

[0228] FIG. 170 shows a nucleotide sequence (SEQ ID NO:170) of a native sequence PRO38457 cDNA, wherein SEQ ID NO:170 is a clone designated herein as “DNA227994”.

[0229] FIG. 171 shows the amino acid sequence (SEQ ID NO:171) derived from the coding sequence of SEQ ID NO:170 shown in FIG. 170.

[0230] FIG. 172 shows a nucleotide sequence (SEQ ID NO:172) of a native sequence PRO4767 cDNA, wherein SEQ ID NO:172 is a clone designated herein as “DNA103440”.

[0231] FIG. 173 shows the amino acid sequence (SEQ ID NO:173) derived from the coding sequence of SEQ ID NO:172 shown in FIG. 172.

[0232] FIG. 174A-B shows a nucleotide sequence (SEQ ID NO:174) of a native sequence PRO12884 cDNA, wherein SEQ ID NO:174 is a clone designated herein as “DNA151707”.

[0233] FIG. 175 shows the amino acid sequence (SEQ ID NO:175) derived from the coding sequence of SEQ ID NO:174 shown in FIG. 174A-B.

[0234] FIG. 176 shows a nucleotide sequence (SEQ ID NO:176) of a native sequence PRO12586 cDNA, wherein SEQ ID NO:176 is a clone designated herein as “DNA151037”.

[0235] FIG. 177 shows the amino acid sequence (SEQ ID NO:177) derived from the coding sequence of SEQ ID NO:176 shown in FIG. 176.

[0236] FIG. 178A-B shows a nucleotide sequence (SEQ ID NO:178) of a native sequence PRO84692 cDNA, wherein SEQ ID NO:178 is a clone designated herein as “DNA329017”.

[0237] FIG. 179 shows the amino acid sequence (SEQ ID NO:179) derived from the coding sequence of SEQ ID NO:178 shown in FIG. 178A-B.

[0238] FIG. 180 shows a nucleotide sequence (SEQ ID NO:180) of a native sequence PRO12280 cDNA, wherein SEQ ID NO:180 is a clone designated herein as “DNA150478”.

[0239] FIG. 181 shows the amino acid sequence (SEQ ID NO:181) derived from the coding sequence of SEQ ID NO:180 shown in FIG. 180.

[0240] FIG. 182 shows a nucleotide sequence (SEQ ID NO:182) of a native sequence PRO23859 cDNA, wherein SEQ ID NO:182 is a clone designated herein as “DNA328957”.

[0241] FIG. 183 shows the amino acid sequence (SEQ ID NO:183) derived from the coding sequence of SEQ ID NO:182 shown in FIG. 182.

[0242] FIG. 184 shows a nucleotide sequence (SEQ ID NO:184) of a native sequence PRO2577 cDNA, wherein SEQ ID NO:184 is a clone designated herein as “DNA328542”.

[0243] FIG. 185 shows the amino acid sequence (SEQ ID NO:185) derived from the coding sequence of SEQ ID NO:184 shown in FIG. 184.

[0244] FIG. 186 shows a nucleotide sequence (SEQ ID NO:186) of a native sequence PRO37696 cDNA, wherein SEQ ID NO:186 is a clone designated herein as “DNA227233”.

[0245] FIG. 187 shows the amino acid sequence (SEQ ID NO:187) derived from the coding sequence of SEQ ID NO:186 shown in FIG. 186.

[0246] FIG. 188 shows a nucleotide sequence (SEQ ID NO:188) of a native sequence PRO24075 cDNA, wherein SEQ ID NO:188 is a clone designated herein as “DNA194805”.

[0247] FIG. 189 shows the amino acid sequence (SEQ ID NO:189) derived from the coding sequence of SEQ ID NO:188 shown in FIG. 188.

[0248] FIG. 190A-B shows a nucleotide sequence (SEQ ID NO:190) of a native sequence PRO71042 cDNA, wherein SEQ ID NO:190 is a clone designated herein as “DNA304464”.

[0249] FIG. 191 shows the amino acid sequence (SEQ ID NO:191) derived from the coding sequence of SEQ ID NO:190 shown in FIG. 190A-B.

[0250] FIG. 192A-B shows a nucleotide sequence (SEQ ID NO:192) of a native sequence PRO37639 cDNA, wherein SEQ ID NO:192 is a clone designated herein as “DNA227176”.

[0251] FIG. 193 shows the amino acid sequence (SEQ ID NO:193) derived from the coding sequence of SEQ ID NO:192 shown in FIG. 192A-B.

[0252] FIG. 194 shows a nucleotide sequence (SEQ ID NO:194) of a native sequence PRO84693 cDNA, wherein SEQ ID NO:192 is a clone designated herein as “DNA329018”.

[0253] FIG. 195 shows the amino acid sequence (SEQ ID NO:195) derived from the coding sequence of SEQ ID NO:194 shown in FIG. 194.

[0254] FIG. 196 shows a nucleotide sequence (SEQ ID NO:196) of a native sequence PRO37272 cDNA, wherein SEQ ID NO:196 is a clone designated herein as “DNA226809”.

[0255] FIG. 197 shows the amino acid sequence (SEQ ID NO:197) derived from the coding sequence of SEQ ID NO:196 shown in FIG. 196.

[0256] FIG. 198 shows a nucleotide sequence (SEQ ID NO:198) of a native sequence PRO84694 cDNA, wherein SEQ ID NO:198 is a clone designated herein as “DNA329019”.

[0257] FIG. 199 shows the amino acid sequence (SEQ ID NO:199) derived from the coding sequence of SEQ ID NO:198 shown in FIG. 198.

[0258] FIG. 200A-B shows a nucleotide sequence (SEQ ID NO:200) of a native sequence PRO4330 cDNA, wherein SEQ ID NO:200 is a clone designated herein as “DNA328454”.

[0259] FIG. 201 shows the amino acid sequence (SEQ ID NO:201) derived from the coding sequence of SEQ ID NO:200 shown in FIG. 200A-B.

[0260] FIG. 202 shows a nucleotide sequence (SEQ ID NO:202) of a native sequence PRO84695 cDNA, wherein SEQ ID NO:202 is a clone designated herein as “DNA329020”.

[0261] FIG. 203 shows the amino acid sequence (SEQ ID NO:203) derived from the coding sequence of SEQ ID NO:202 shown in FIG. 202.

[0262] FIG. 204 shows a nucleotide sequence (SEQ ID NO:204) of a native sequence PRO285 cDNA, wherein SEQ ID NO:204 is a clone designated herein as “DNA329021”.

[0263] FIG. 205 shows the amino acid sequence (SEQ ID NO:205) derived from the coding sequence of SEQ ID NO:204 shown in FIG. 204.

[0264] FIG. 206 shows a nucleotide sequence (SEQ ID NO:206) of a native sequence PRO38310 cDNA, wherein SEQ ID NO:206 is a clone designated herein as “DNA329022”.

[0265] FIG. 207 shows the amino acid sequence (SEQ ID NO:207) derived from the coding sequence of SEQ ID NO:206 shown in FIG. 206.

[0266] FIG. 208 shows a nucleotide sequence (SEQ ID NO:208) of a native sequence PRO37657 cDNA, wherein SEQ ID NO:208 is a clone designated herein as “DNA227194”.

[0267] FIG. 209 shows the amino acid sequence (SEQ ID NO:209) derived from the coding sequence of SEQ ID NO:208 shown in FIG. 208.

[0268] FIG. 210 shows a nucleotide sequence (SEQ ID NO:210) of a native sequence PRO71061 cDNA, wherein SEQ ID NO:210 is a clone designated herein as “DNA304494”.

[0269] FIG. 211 shows the amino acid sequence (SEQ ID NO:211) derived from the coding sequence of SEQ ID NO:210 shown in FIG. 210.

[0270] FIG. 212 shows a nucleotide sequence (SEQ ID NO:212) of a native sequence PRO209 cDNA, wherein SEQ ID NO:212 is a clone designated herein as “DNA329023”.

[0271] FIG. 213 shows the amino acid sequence (SEQ ID NO:213) derived from the coding sequence of SEQ ID NO:212 shown in FIG. 212.

[0272] FIG. 214 shows a nucleotide sequence (SEQ ID NO:214) of a native sequence PRO37584 cDNA, wherein SEQ ID NO:214 is a clone designated herein as “DNA227121”.

[0273] FIG. 215 shows the amino acid sequence (SEQ ID NO:215 derived from the coding sequence of SEQ ID NO:214 shown in FIG. 214.

[0274] FIG. 216A-B shows a nucleotide sequence (SEQ ID NO:216) of a native sequence PRO84696 cDNA, wherein SEQ ID NO:216 is a clone designated herein as “DNA329024”.

[0275] FIG. 217 shows the amino acid sequence (SEQ ID NO:217) derived from the coding sequence of SEQ ID NO:216 shown in FIG. 216A-B.

[0276] FIG. 218 shows a nucleotide sequence (SEQ ID NO:218) of a native sequence PRO4860 cDNA, wherein SEQ ID NO:218 is a clone designated herein as “DNA329025”.

[0277] FIG. 219 shows the amino acid sequence (SEQ ID NO:219) derived from the coding sequence of SEQ ID NO:218 shown in FIG. 218.

[0278] FIG. 220A-B shows a nucleotide sequence (SEQ ID NO:220) of a native sequence PRO38492 cDNA, wherein SEQ ID NO:172 is a clone designated herein as “DNA228029”.

[0279] FIG. 221 shows the amino acid sequence (SEQ ID NO:221) derived from the coding sequence of SEQ ID NO:220 shown in FIG. 220A-B.

[0280] FIG. 222 shows a nucleotide sequence (SEQ ID NO:222) of a native sequence cDNA, wherein SEQ ID NO:222 is a clone designated herein as “DNA150980”.

[0281] FIG. 223 shows a nucleotide sequence (SEQ ID NO:223) of a native sequence cDNA, wherein SEQ ID NO:223 is a clone designated herein as “DNA329026”.

[0282] FIG. 224 shows a nucleotide sequence (SEQ ID NO:224) of a native sequence PRO11738 cDNA, wherein SEQ ID NO:224 is a clone designated herein as “DNA151360”.

[0283] FIG. 225 shows the amino acid sequence (SEQ ID NO:225) derived from the coding sequence of SEQ ID NO:224 shown in FIG. 224.

[0284] FIG. 226 shows a nucleotide sequence (SEQ ID NO:226) of a native sequence PRO69476 cDNA, wherein SEQ ID NO:226 is a clone designated herein as “DNA287190”.

[0285] FIG. 227 shows the amino acid sequence (SEQ ID NO:227) derived from the coding sequence of SEQ ID NO:226 shown in FIG. 226.

[0286] FIG. 228 shows a nucleotide sequence (SEQ ID NO:228) of a native sequence PRO12032 cDNA, wherein SEQ ID NO:228 is a clone designated herein as “DNA151744”.

[0287] FIG. 229 shows the amino acid sequence (SEQ ID NO:229) derived from the coding sequence of SEQ ID NO:228 shown in FIG. 228.

[0288] FIG. 230 shows a nucleotide sequence (SEQ ID NO:230) of a native sequence cDNA, wherein SEQ ID NO:230 is a clone designated herein as “DNA161393”.

[0289] FIG. 231 shows a nucleotide sequence (SEQ ID NO:231) of a native sequence PRO69484 cDNA, wherein SEQ ID NO:231 is a clone designated herein as “DNA287198”.

[0290] FIG. 232 shows the amino acid sequence (SEQ ID NO:232) derived from the coding sequence of SEQ ID NO:231 shown in FIG. 231.

[0291] FIG. 233 shows a nucleotide sequence (SEQ ID NO:233) of a native sequence cDNA, wherein SEQ ID NO:233 is a clone designated herein as “DNA274998”.

[0292] FIG. 234 shows a nucleotide sequence (SEQ ID NO:234) of a native sequence PRO23460 cDNA, wherein SEQ ID NO:234 is a clone designated herein as “DNA194063”.

[0293] FIG. 235 shows the amino acid sequence (SEQ ID NO:235) derived from the coding sequence of SEQ ID NO:234 shown in FIG. 234.

[0294] FIG. 236A-B shows a nucleotide sequence (SEQ ID NO:236) of a native sequence PRO84476 cDNA, wherein SEQ ID NO:236 is a clone designated herein as “DNA328720”.

[0295] FIG. 237 shows the amino acid sequence (SEQ ID NO:237) derived from the coding sequence of SEQ ID NO:236 shown in FIG. 236A-B.

[0296] FIG. 238 shows a nucleotide sequence (SEQ ID NO:238) of a native sequence PRO84697 cDNA, wherein SEQ ID NO:238 is a clone designated herein as “DNA329027”.

[0297] FIG. 239 shows the amino acid sequence (SEQ ID NO:239) derived from the coding sequence of SEQ ID NO:238 shown in FIG. 238.

[0298] FIG. 240 shows a nucleotide sequence (SEQ ID NO:240) of a native sequence cDNA, wherein SEQ ID NO:240 is a clone designated herein as “DNA329028”.

[0299] FIG. 241 shows a nucleotide sequence (SEQ ID NO:241) of a native sequence cDNA, wherein SEQ ID NO:241 is a clone designated herein as “DNA329029”.

[0300] FIG. 242 shows a nucleotide sequence (SEQ ID NO:242) of a native sequence PRO71207 cDNA, wherein SEQ ID NO:242 is a clone designated herein as “DNA304795”.

[0301] FIG. 243 shows the amino acid sequence (SEQ ID NO:243) derived from the coding sequence of SEQ ID NO:242 shown in FIG. 242.

[0302] FIG. 244 shows a nucleotide sequence (SEQ ID NO:244) of a native sequence cDNA, wherein SEQ ID NO:244 is a clone designated herein as “DNA323696”.

[0303] FIG. 245 shows a nucleotide sequence (SEQ ID NO:245) of a native sequence PRO28714 cDNA, wherein SEQ ID NO:245 is a clone designated herein as “DNA188014”.

[0304] FIG. 246 shows the amino acid sequence (SEQ ID NO:246) derived from the coding sequence of SEQ ID NO:245 shown in FIG. 245.

[0305] FIG. 247A-B shows a nucleotide sequence (SEQ ID NO:247) of a native sequence PRO84698 cDNA, wherein SEQ ID NO:247 is a clone designated herein as “DNA329030”.

[0306] FIG. 248 shows the amino acid sequence (SEQ ID NO:248) derived from the coding sequence of SEQ ID NO:247 shown in FIG. 247A-B.

[0307] FIG. 249 shows a nucleotide sequence (SEQ ID NO:249) of a native sequence PRO49839 cDNA, wherein SEQ ID NO:249 is a clone designated herein as “DNA254741”.

[0308] FIG. 250 shows the amino acid sequence (SEQ ID NO:250) derived from the coding sequence of SEQ ID NO:249 shown in FIG. 249.

[0309] FIG. 251 shows a nucleotide sequence (SEQ ID NO:251) of a native sequence PRO84441 cDNA, wherein SEQ ID NO:251 is a clone designated herein as “DNA328669”.

[0310] FIG. 252 shows the amino acid sequence (SEQ ID NO:252) derived from the coding sequence of SEQ ID NO:251 shown in FIG. 251.

[0311] FIG. 253 shows a nucleotide sequence (SEQ ID NO:253) of a native sequence PRO49214 cDNA, wherein SEQ ID NO:253 is a clone designated herein as “DNA253811”.

[0312] FIG. 254 shows the amino acid sequence (SEQ ID NO:254) derived from the coding sequence of SEQ ID NO:253 shown in FIG. 253.

[0313] FIG. 255 shows a nucleotide sequence (SEQ ID NO:255) of a native sequence PRO50523 cDNA, wherein SEQ ID NO:255 is a clone designated herein as “DNA255456”.

[0314] FIG. 256 shows the amino acid sequence (SEQ ID NO:256) derived from the coding sequence of SEQ ID NO:255 shown in FIG. 255.

[0315] FIG. 257 shows a nucleotide sequence (SEQ ID NO:257) of a native sequence PRO50241 cDNA, wherein SEQ ID NO:257 is a clone designated herein as “DNA255161”.

[0316] FIG. 258 shows the amino acid sequence (SEQ ID NO:258) derived from the coding sequence of SEQ ID NO:257 shown in FIG. 257.

[0317] FIG. 259 shows a nucleotide sequence (SEQ ID NO:259) of a native sequence PRO83773 cDNA, wherein SEQ ID NO:259 is a clone designated herein as “DNA327812”.

[0318] FIG. 260 shows the amino acid sequence (SEQ ID NO:260) derived from the coding sequence of SEQ ID NO:259 shown in FIG. 259.

[0319] FIG. 261 shows a nucleotide sequence (SEQ ID NO:261) of a native sequence PRO84699 cDNA, wherein SEQ ID NO:261 is a clone designated herein as “DNA329031”.

[0320] FIG. 262 shows the amino acid sequence (SEQ ID NO:262) derived from the coding sequence of SEQ ID NO:261 shown in FIG. 261.

[0321] FIG. 263 shows a nucleotide sequence (SEQ ID NO:263) of a native sequence PRO50772 cDNA, wherein SEQ ID NO:263 is a clone designated herein as “DNA329032”.

[0322] FIG. 264 shows the amino acid sequence (SEQ ID NO:264) derived from the coding sequence of SEQ ID NO:263 shown in FIG. 263.

[0323] FIG. 265 shows a nucleotide sequence (SEQ ID NO:265) of a native sequence PRO49326 cDNA, wherein SEQ ID NO:265 is a clone designated herein as “DNA254214”.

[0324] FIG. 266 shows the amino acid sequence (SEQ ID NO:266) derived from the coding sequence of SEQ ID NO:265 shown in FIG. 265.

[0325] FIG. 267 shows a nucleotide sequence (SEQ ID NO:267) of a native sequence PRO49824 cDNA, wherein SEQ ID NO:267 is a clone designated herein as “DNA254725”.

[0326] FIG. 268 shows the amino acid sequence (SEQ ID NO:268) derived from the coding sequence of SEQ ID NO:267 shown in FIG. 267.

[0327] FIG. 269 shows a nucleotide sequence (SEQ ID NO:269) of a native sequence PRO70333 cDNA, wherein SEQ ID NO:269 is a clone designated herein as “DNA290234”.

[0328] FIG. 270 shows the amino acid sequence (SEQ ID NO:270) derived from the coding sequence of SEQ ID NO:269 shown in FIG. 269.

[0329] FIG. 271 shows a nucleotide sequence (SEQ ID NO:271) of a native sequence PRO83673 cDNA, wherein SEQ ID NO:271 is a clone designated herein as “DNA327690”.

[0330] FIG. 272 shows the amino acid sequence (SEQ ID NO:272) derived from the coding sequence of SEQ ID NO:271 shown in FIG. 271.

[0331] FIG. 273 shows a nucleotide sequence (SEQ ID NO:273) of a native sequence PRO50332 cDNA, wherein SEQ ID NO:273 is a clone designated herein as “DNA255255”.

[0332] FIG. 274 shows the amino acid sequence (SEQ ID NO:274) derived from the coding sequence of SEQ ID NO:273 shown in FIG. 273.

[0333] FIG. 275 shows a nucleotide sequence (SEQ ID NO:275) of a native sequence PRO51295 cDNA, wherein SEQ ID NO:275 is a clone designated herein as “DNA256251”.

[0334] FIG. 276 shows the amino acid sequence (SEQ ID NO:276) derived from the coding sequence of SEQ ID NO:275 shown in FIG. 275.

[0335] FIG. 277 shows a nucleotide sequence (SEQ ID NO:277) of a native sequence PRO51621 cDNA, wherein SEQ ID NO:277 is a clone designated herein as “DNA256637”.

[0336] FIG. 278 shows the amino acid sequence (SEQ ID NO:278) derived from the coding sequence of SEQ ID NO:277 shown in FIG. 277.

[0337] FIG. 279 shows a nucleotide sequence (SEQ ID NO:279) of a native sequence PRO34958 cDNA, wherein SEQ ID NO:279 is a clone designated herein as “DNA210497”.

[0338] FIG. 280 shows the amino acid sequence (SEQ ID NO:280) derived from the coding sequence of SEQ ID NO:279 shown in FIG. 279.

[0339] FIG. 281 shows a nucleotide sequence (SEQ ID NO:281) of a native sequence PRO50821 cDNA, wherein SEQ ID NO:281 is a clone designated herein as “DNA255766”.

[0340] FIG. 282 shows the amino acid sequence (SEQ ID NO:282) derived from the coding sequence of SEQ ID NO:281 shown in FIG. 281.

[0341] FIG. 283 shows a nucleotide sequence (SEQ ID NO:283) of a native sequence PRO84700 cDNA, wherein SEQ ID NO:283 is a clone designated herein as “DNA329033”.

[0342] FIG. 284 shows the amino acid sequence (SEQ ID NO:284) derived from the coding sequence of SEQ ID NO:283 shown in FIG. 283.

[0343] FIG. 285 shows a nucleotide sequence (SEQ ID NO:285) of a native sequence PRO84701 cDNA, wherein SEQ ID NO:285 is a clone designated herein as “DNA329043”.

[0344] FIG. 286 shows the amino acid sequence (SEQ ID NO:286) derived from the coding sequence of SEQ ID NO:285 shown in FIG. 285.

[0345] FIG. 287 shows a nucleotide sequence (SEQ ID NO:287) of a native sequence PRO60333 cDNA, wherein SEQ ID NO:287 is a clone designated herein as “DNA272062”.

[0346] FIG. 288 shows the amino acid sequence (SEQ ID NO:288) derived from the coding sequence of SEQ ID NO:287 shown in FIG. 287.

[0347] FIG. 289A-B shows a nucleotide sequence (SEQ ID NO:289) of a native sequence PRO50187 cDNA, wherein SEQ ID NO:289 is a clone designated herein as “DNA255105”.

[0348] FIG. 290 shows the amino acid sequence (SEQ ID NO:290) derived from the coding sequence of SEQ ID NO:289 shown in FIG. 289A-B.

[0349] FIG. 291 shows a nucleotide sequence (SEQ ID NO:291) of a native sequence PRO48357 cDNA, wherein SEQ ID NO:291 is a clone designated herein as “DNA252367”.

[0350] FIG. 292 shows the amino acid sequence (SEQ ID NO:292) derived from the coding sequence of SEQ ID NO:291 shown in FIG. 291.

[0351] FIG. 293A-B shows a nucleotide sequence (SEQ ID NO:293) of a native sequence PRO50365 cDNA, wherein SEQ ID NO:293 is a clone designated herein as “DNA255292”.

[0352] FIG. 294 shows the amino acid sequence (SEQ ID NO:294) derived from the coding sequence of SEQ ID NO:293 shown in FIG. 293A-B.

[0353] FIG. 295 shows a nucleotide sequence (SEQ ID NO:295) of a native sequence PRO84702 cDNA, wherein SEQ ID NO:295 is a clone designated herein as “DNA329035”.

[0354] FIG. 296 shows the amino acid sequence (SEQ ID NO:296) derived from the coding sequence of SEQ ID NO:295 shown in FIG. 295.

[0355] FIG. 297 shows a nucleotide sequence (SEQ ID NO:297) of a native sequence PRO49810 cDNA, wherein SEQ ID NO:297 is a clone designated herein as “DNA254710”.

[0356] FIG. 298 shows the amino acid sequence (SEQ ID NO:298) derived from the coding sequence of SEQ ID NO:297 shown in FIG. 297.

[0357] FIG. 299A-B shows a nucleotide sequence (SEQ ID NO:299) of a native sequence PRO58710 cDNA, wherein SEQ ID NO:299 is a clone designated herein as “DNA270323”.

[0358] FIG. 300 shows the amino acid sequence (SEQ ID NO:300) derived from the coding sequence of SEQ ID NO:299 shown in FIG. 299A-B.

[0359] FIG. 301 shows a nucleotide sequence (SEQ ID NO:301) of a native sequence PRO69503 cDNA, wherein SEQ ID NO:301 is a clone designated herein as “DNA287224”.

[0360] FIG. 302 shows the amino acid sequence (SEQ ID NO:302) derived from the coding sequence of SEQ ID NO:301 shown in FIG. 301.

[0361] FIG. 303A-B shows a nucleotide sequence (SEQ ID NO:303) of a native sequence PRO49564 cDNA, wherein SEQ ID NO:303 is a clone designated herein as “DNA254455”.

[0362] FIG. 304 shows the amino acid sequence (SEQ ID NO:304) derived from the coding sequence of SEQ ID NO:303 shown in FIG. 303A-B.

[0363] FIG. 305A-B shows a nucleotide sequence (SEQ ID NO:305) of a native sequence PRO84703 cDNA, wherein SEQ ID NO:305 is a clone designated herein as “DNA329036”.

[0364] FIG. 306 shows the amino acid sequence (SEQ ID NO:306) derived from the coding sequence of SEQ ID NO:305 shown in FIG. 305A-B.

[0365] FIG. 307 shows a nucleotide sequence (SEQ ID NO:307) of a native sequence PRO84663 cDNA, wherein SEQ ID NO:307 is a clone designated herein as “DNA328952”.

[0366] FIG. 308 shows the amino acid sequence (SEQ ID NO:308) derived from the coding sequence of SEQ ID NO:307 shown in FIG. 307.

[0367] FIG. 309 shows a nucleotide sequence (SEQ ID NO:309) of a native sequence PRO83800 cDNA, wherein SEQ ID NO:309 is a clone designated herein as “DNA327858”.

[0368] FIG. 310 shows the amino acid sequence (SEQ ID NO:310) derived from the coding sequence of SEQ ID NO:310 shown in FIG. 310.

[0369] FIG. 311A-D shows a nucleotide sequence (SEQ ID NO:311) of a native sequence PRO84704 cDNA, wherein SEQ ID NO:311 is a clone designated herein as “DNA329037”.

[0370] FIG. 312A-B shows the amino acid sequence (SEQ ID NO:312) derived from the coding sequence of SEQ ID NO:311 shown in FIG. 311A-D.

[0371] FIG. 313 shows a nucleotide sequence (SEQ ID NO:313) of a native sequence PRO84705 cDNA, wherein SEQ ID NO:313 is a clone designated herein as “DNA329038”.

[0372] FIG. 314 shows the amino acid sequence (SEQ ID NO:314) derived from the coding sequence of SEQ ID NO:313 shown in FIG. 313.

[0373] FIG. 315A-B shows a nucleotide sequence (SEQ ID NO:315) of a native sequence PRO84706 cDNA, wherein SEQ ID NO:315 is a clone designated herein as “DNA329039”.

[0374] FIG. 316 shows the amino acid sequence (SEQ ID NO:316) derived from the coding sequence of SEQ ID NO:315 shown in FIG. 315A-B.

[0375] FIG. 317 shows a nucleotide sequence (SEQ ID NO:317) of a native sequence PRO57996 cDNA, wherein SEQ ID NO:317 is a clone designated herein as “DNA328509”.

[0376] FIG. 318 shows the amino acid sequence (SEQ ID NO:318) derived from the coding sequence of SEQ ID NO:317 shown in FIG. 317.

[0377] FIG. 319A-B shows a nucleotide sequence (SEQ ID NO:319) of a native sequence PRO84368 cDNA, wherein SEQ ID NO:309 is a clone designated herein as “DNA328574”.

[0378] FIG. 320 shows the amino acid sequence (SEQ ID NO:320) derived from the coding sequence of SEQ ID NO:319 shown in FIG. 319A-B.

[0379] FIG. 321 shows a nucleotide sequence (SEQ ID NO:321) of a native sequence cDNA, wherein SEQ ID NO:321 is a clone designated herein as “DNA256872”.

[0380] FIG. 322 shows a nucleotide sequence (SEQ ID NO:322) of a native sequence cDNA, wherein SEQ ID NO:322 is a clone designated herein as “DNA256422”.

[0381] FIG. 323 shows a nucleotide sequence (SEQ ID NO:323) of a native sequence PRO84496 cDNA, wherein SEQ ID NO:323 is a clone designated herein as “DNA328744”.

[0382] FIG. 324 shows the amino acid sequence (SEQ ID NO:324) derived from the coding sequence of SEQ ID NO:323 shown in FIG. 323.

[0383] FIG. 325 shows a nucleotide sequence (SEQ ID NO:325) of a native sequence PRO84707 cDNA, wherein SEQ ID NO:325 is a clone designated herein as “DNA329040”.

[0384] FIG. 326 shows the amino acid sequence (SEQ ID NO:326) derived from the coding sequence of SEQ ID NO:325 shown in FIG. 325.

[0385] FIG. 327 shows a nucleotide sequence (SEQ ID NO:327) of a native sequence cDNA, wherein SEQ ID NO:327 is a clone designated herein as “DNA329041”.

[0386] FIG. 328 shows a nucleotide sequence (SEQ ID NO:328) of a native sequence PRO49765 cDNA, wherein SEQ ID NO:328 is a clone designated herein as “DNA329042”.

[0387] FIG. 329 shows the amino acid sequence (SEQ ID NO:329) derived from the coding sequence of SEQ ID NO:328 shown in FIG. 328.

[0388] FIG. 330 shows a nucleotide sequence (SEQ ID NO:330) of a native sequence cDNA, wherein SEQ ID NO:330 is a clone designated herein as “DNA254286”.

[0389] FIG. 331 shows a nucleotide sequence (SEQ ID NO:331) of a native sequence PRO23253 cDNA, wherein SEQ ID NO:331 is a clone designated herein as “DNA329043”.

[0390] FIG. 332 shows the amino acid sequence (SEQ ID NO:332) derived from the coding sequence of SEQ ID NO:331 shown in FIG. 331.

[0391] FIG. 333 shows a nucleotide sequence (SEQ ID NO:333) of a native sequence PRO84709 cDNA, wherein SEQ ID NO:333 is a clone designated herein as “DNA329044”.

[0392] FIG. 334 shows the amino acid sequence (SEQ ID NO:334) derived from the coding sequence of SEQ ID NO:333 shown in FIG. 333.

[0393] FIG. 335A-B shows a nucleotide sequence (SEQ ID NO:335) of a native sequence PRO82352 cDNA, wherein SEQ ID NO:335 is a clone designated herein as “DNA325896”.

[0394] FIG. 336 shows the amino acid sequence (SEQ ID NO:336) derived from the coding sequence of SEQ ID NO:335 shown in FIG. 335A-B.

[0395] FIG. 337 shows a nucleotide sequence (SEQ ID NO:337) of a native sequence PRO82903 cDNA, wherein SEQ ID NO:337 is a clone designated herein as “DNA326535”.

[0396] FIG. 338 shows the amino acid sequence (SEQ ID NO:338) derived from the coding sequence of SEQ ID NO:337 shown in FIG. 337.

[0397] FIG. 339 shows a nucleotide sequence (SEQ ID NO:339) of a native sequence PRO83260 cDNA, wherein SEQ ID NO:339 is a clone designated herein as “DNA326942”.

[0398] FIG. 340 shows the amino acid sequence (SEQ ID NO:340) derived from the coding sequence of SEQ ID NO:339 shown in FIG. 339.

[0399] FIG. 341 shows a nucleotide sequence (SEQ ID NO:341) of a native sequence PRO83681 cDNA, wherein SEQ ID NO:341 is a clone designated herein as “DNA327698”.

[0400] FIG. 342 shows the amino acid sequence (SEQ ID NO:342) derived from the coding sequence of SEQ ID NO:341 shown in FIG. 341.

[0401] FIG. 343 shows a nucleotide sequence (SEQ ID NO:343) of a native sequence PRO69487 cDNA, wherein SEQ ID NO:343 is a clone designated herein as “DNA287203”.

[0402] FIG. 344 shows the amino acid sequence (SEQ ID NO:344) derived from the coding sequence of SEQ ID NO:343 shown in FIG. 343.

[0403] FIG. 345 shows a nucleotide sequence (SEQ ID NO:345) of a native sequence PRO83148 cDNA, wherein SEQ ID NO:345 is a clone designated herein as “DNA329045”.

[0404] FIG. 346 shows the amino acid sequence (SEQ ID NO:346) derived from the coding sequence of SEQ ID NO:345 shown in FIG. 345.

[0405] FIG. 347 shows a nucleotide sequence (SEQ ID NO:347) of a native sequence PRO58958 cDNA, wherein SEQ ID NO:347 is a clone designated herein as “DNA270585”.

[0406] FIG. 348 shows the amino acid sequence (SEQ ID NO:348) derived from the coding sequence of SEQ ID NO:347 shown in FIG. 347.

[0407] FIG. 349 shows a nucleotide sequence (SEQ ID NO:349) of a native sequence PRO58399 cDNA, wherein SEQ ID NO:349 is a clone designated herein as “DNA329046”.

[0408] FIG. 350 shows the amino acid sequence (SEQ ID NO:350) derived from the coding sequence of SEQ ID NO:349 shown in FIG. 349.

[0409] FIG. 351 shows a nucleotide sequence (SEQ ID NO:351) of a native sequence PRO80649 cDNA, wherein SEQ ID NO:351 is a clone designated herein as “DNA327584”.

[0410] FIG. 352 shows the amino acid sequence (SEQ ID NO:352) derived from the coding sequence of SEQ ID NO:351 shown in FIG. 351.

[0411] FIG. 353 shows a nucleotide sequence (SEQ ID NO:353) of a native sequence PRO58425 cDNA, wherein SEQ ID NO:353 is a clone designated herein as “DNA329047”.

[0412] FIG. 354 shows the amino acid sequence (SEQ ID NO:354) derived from the coding sequence of SEQ ID NO:353 shown in FIG. 353.

[0413] FIG. 355 shows a nucleotide sequence (SEQ ID NO:355) of a native sequence PRO84376 cDNA, wherein SEQ ID NO:355 is a clone designated herein as “DNA328591”.

[0414] FIG. 356 shows the amino acid sequence (SEQ ID NO:356) derived from the coding sequence of SEQ ID NO:355 shown in FIG. 355.

[0415] FIG. 357 shows a nucleotide sequence (SEQ ID NO:357) of a native sequence PRO84309 cDNA, wherein SEQ ID NO:357 is a clone designated herein as “DNA328483”.

[0416] FIG. 358 shows the amino acid sequence (SEQ ID NO:358) derived from the coding sequence of SEQ ID NO:357 shown in FIG. 357.

[0417] FIG. 359 shows a nucleotide sequence (SEQ ID NO:359) of a native sequence PRO59142 cDNA, wherein SEQ ID NO:359 is a clone designated herein as “DNA326777”.

[0418] FIG. 360 shows the amino acid sequence (SEQ ID NO:360) derived from the coding sequence of SEQ ID NO:359 shown in FIG. 359.

[0419] FIG. 361A-B shows a nucleotide sequence (SEQ ID NO:361) of a native sequence PRO58810 cDNA, wherein SEQ ID NO:361 is a clone designated herein as “DNA270430”.

[0420] FIG. 362 shows the amino acid sequence (SEQ ID NO:362) derived from the coding sequence of SEQ ID NO:361 shown in FIG. 361A-B.

[0421] FIG. 363 shows a nucleotide sequence (SEQ ID NO:363) of a native sequence PRO84710 cDNA, wherein SEQ ID NO:363 is a clone designated herein as “DNA329048”.

[0422] FIG. 364 shows the amino acid sequence (SEQ ID NO:364) derived from the coding sequence of SEQ ID NO:363 shown in FIG. 363.

[0423] FIG. 365 shows a nucleotide sequence (SEQ ID NO:365) of a native sequence PRO80648 cDNA, wherein SEQ ID NO:365 is a clone designated herein as “DNA323910”.

[0424] FIG. 366 shows the amino acid sequence (SEQ ID NO:366) derived from the coding sequence of SEQ ID NO:365 shown in FIG. 365.

[0425] FIG. 367A-C shows a nucleotide sequence (SEQ ID NO:367) of a native sequence PRO84711 cDNA, wherein SEQ ID NO:367 is a clone designated herein as “DNA329049”.

[0426] FIG. 368 shows the amino acid sequence (SEQ ID NO:368) derived from the coding sequence of SEQ ID NO:367 shown in FIG. 367A-C.

[0427] FIG. 369 shows a nucleotide sequence (SEQ ID NO:369) of a native sequence PRO84712 cDNA, wherein SEQ ID NO:369 is a clone designated herein as “DNA329050”.

[0428] FIG. 370 shows the amino acid sequence (SEQ ID NO:370) derived from the coding sequence of SEQ ID NO:369 shown in FIG. 369.

[0429] FIG. 371 shows a nucleotide sequence (SEQ ID NO:371) of a native sequence PRO82872 cDNA, wherein SEQ ID NO:371 is a clone designated herein as “DNA326496”.

[0430] FIG. 372 shows the amino acid sequence (SEQ ID NO:372) derived from the coding sequence of SEQ ID NO:371 shown in FIG. 371.

[0431] FIG. 373A-B shows a nucleotide sequence (SEQ ID NO:373) of a native sequence cDNA, wherein SEQ ID NO:373 is a clone designated herein as “DNA329051”.

[0432] FIG. 374 shows a nucleotide sequence (SEQ ID NO:374) of a native sequence PRO84714 cDNA, wherein SEQ ID NO:374 is a clone designated herein as “DNA329052”.

[0433] FIG. 375 shows the amino acid sequence (SEQ ID NO:375) derived from the coding sequence of SEQ ID NO:374 shown in FIG. 374.

[0434] FIG. 376 shows a nucleotide sequence (SEQ ID NO:376) of a native sequence PRO84183 cDNA, wherein SEQ ID NO:376 is a clone designated herein as “DNA328315”.

[0435] FIG. 377 shows the amino acid sequence (SEQ ID NO:377) derived from the coding sequence of SEQ ID NO:376 shown in FIG. 376.

[0436] FIG. 378 shows a nucleotide sequence (SEQ ID NO:378) of a native sequence PRO83879 cDNA, wherein SEQ ID NO:378 is a clone designated herein as “DNA327954”.

[0437] FIG. 379 shows the amino acid sequence (SEQ ID NO:379) derived from the coding sequence of SEQ ID NO:378 shown in FIG. 378.

[0438] FIG. 380 shows a nucleotide sequence (SEQ ID NO:380) of a native sequence PRO84715 cDNA, wherein SEQ ID NO:380 is a clone designated herein as “DNA329053”.

[0439] FIG. 381 shows the amino acid sequence (SEQ ID NO:381) derived from the coding sequence of SEQ ID NO:380 shown in FIG. 380.

[0440] FIG. 382 shows a nucleotide sequence (SEQ ID NO:382) of a native sequence PRO84716 cDNA, wherein SEQ ID NO:382 is a clone designated herein as “DNA329054”.

[0441] FIG. 383 shows the amino acid sequence (SEQ ID NO:383) derived from the coding sequence of SEQ ID NO:382 shown in FIG. 382.

[0442] FIG. 384A-B shows a nucleotide sequence (SEQ ID NO:384) of a native sequence PRO84717 cDNA, wherein SEQ ID NO:384 is a clone designated herein as “DNA329055”.

[0443] FIG. 385 shows the amino acid sequence (SEQ ID NO:385) derived from the coding sequence of SEQ ID NO:384 shown in FIG. 384A-B.

[0444] FIG. 386 shows a nucleotide sequence (SEQ ID NO:386) of a native sequence PRO71206 cDNA, wherein SEQ ID NO:386 is a clone designated herein as “DNA304794”.

[0445] FIG. 387 shows the amino acid sequence (SEQ ID NO:387) derived from the coding sequence of SEQ ID NO:386 shown in FIG. 386.

[0446] FIG. 388 shows a nucleotide sequence (SEQ ID NO:388) of a native sequence PRO51950 cDNA, wherein SEQ ID NO:388 is a clone designated herein as “DNA257363”.

[0447] FIG. 389 shows the amino acid sequence (SEQ ID NO:389) derived from the coding sequence of SEQ ID NO:388 shown in FIG. 388.

[0448] FIG. 390 shows a nucleotide sequence (SEQ ID NO:390) of a native sequence cDNA, wherein SEQ ID NO:390 is a clone designated herein as “DNA259165”.

[0449] FIG. 391 shows a nucleotide sequence (SEQ ID NO:391) of a native sequence PRO71035 cDNA, wherein SEQ ID NO:391 is a clone designated herein as “DNA304068”.

[0450] FIG. 392 shows the amino acid sequence (SEQ ID NO:392) derived from the coding sequence of SEQ ID NO:391 shown in FIG. 391.

[0451] FIG. 393 shows a nucleotide sequence (SEQ ID NO:393) of a native sequence PRO52268 cDNA, wherein SEQ ID NO:393 is a clone designated herein as “DNA257714”.

[0452] FIG. 394 shows the amino acid sequence (SEQ ID NO:394) derived from the coding sequence of SEQ ID NO:393 shown in FIG. 393.

[0453] FIG. 395A-B shows a nucleotide sequence (SEQ ID NO:395) of a native sequence PRO52040 cDNA, wherein SEQ ID NO:395 is a clone designated herein as “DNA257461”.

[0454] FIG. 396 shows the amino acid sequence (SEQ ID NO:396) derived from the coding sequence of SEQ ID NO:395 shown in FIG. 395A-B.

[0455] FIG. 397 shows a nucleotide sequence (SEQ ID NO:397) of a native sequence cDNA, wherein SEQ ID NO:397 is a clone designated herein as “DNA259574”.

[0456] FIG. 398A-B shows a nucleotide sequence (SEQ ID NO:398) of a native sequence PRO71288 cDNA, wherein SEQ ID NO:398 is a clone designated herein as “DNA304990”.

[0457] FIG. 399 shows the amino acid sequence (SEQ ID NO:399) derived from the coding sequence of SEQ ID NO:398 shown in FIG. 398A-B.

[0458] FIG. 400 shows a nucleotide sequence (SEQ ID NO:400) of a native sequence cDNA, wherein SEQ ID NO:400 is a clone designated herein as “DNA262708”.

[0459] FIG. 401 shows a nucleotide sequence (SEQ ID NO:401) of a native sequence cDNA, wherein SEQ ID NO:401 is a clone designated herein as “DNA269148”.

[0460] FIG. 402A-B shows a nucleotide sequence (SEQ ID NO:402) of a native sequence PRO69458 cDNA, wherein SEQ ID NO:402 is a clone designated herein as “DNA304800”.

[0461] FIG. 403 shows the amino acid sequence (SEQ ID NO:403) derived from the coding sequence of SEQ ID NO:402 shown in FIG. 402A-B.

[0462] FIG. 404 shows a nucleotide sequence (SEQ ID NO:404) of a native sequence PRO69903 cDNA, wherein SEQ ID NO:404 is a clone designated herein as “DNA287659”.

[0463] FIG. 405 shows the amino acid sequence (SEQ ID NO:405) derived from the coding sequence of SEQ ID NO:404 shown in FIG. 404.

[0464] FIG. 406 shows a nucleotide sequence (SEQ ID NO:406) of a native sequence cDNA, wherein SEQ ID NO:406 is a clone designated herein as “DNA268714”.

[0465] FIG. 407 shows a nucleotide sequence (SEQ ID NO:407) of a native sequence cDNA, wherein SEQ ID NO:407 is a clone designated herein as “DNA260031”.

[0466] FIG. 408 shows a nucleotide sequence (SEQ ID NO:408) of a native sequence cDNA, wherein SEQ ID NO:408 is a clone designated herein as “DNA259663”.

[0467] FIG. 409 shows a nucleotide sequence (SEQ ID NO:409) of a native sequence cDNA, wherein SEQ ID NO:409 is a clone designated herein as “DNA263300”.

[0468] FIG. 410 shows a nucleotide sequence (SEQ ID NO:410) of a native sequence PRO52672 cDNA, wherein SEQ ID NO:410 is a clone designated herein as “DNA258737”.

[0469] FIG. 411 shows the amino acid sequence (SEQ ID NO:411) derived from the coding sequence of SEQ ID NO:410 shown in FIG. 410.

[0470] FIG. 412 shows a nucleotide sequence (SEQ ID NO:412) of a native sequence PRO52174 cDNA, wherein SEQ ID NO:412 is a clone designated herein as “DNA287258”.

[0471] FIG. 413 shows the amino acid sequence (SEQ ID NO:413) derived from the coding sequence of SEQ ID NO:412 shown in FIG. 412.

[0472] FIG. 414 shows a nucleotide sequence (SEQ ID NO:414) of a native sequence PRO71289 cDNA, wherein SEQ ID NO:414 is a clone designated herein as “DNA304991”.

[0473] FIG. 415 shows the amino acid sequence (SEQ ID NO:415) derived from the coding sequence of SEQ ID NO:414 shown in FIG. 414.

[0474] FIG. 416 shows a nucleotide sequence (SEQ ID NO:416) of a native sequence PRO58230 cDNA, wherein SEQ ID NO:416 is a clone designated herein as “DNA269828”.

[0475] FIG. 417 shows the amino acid sequence (SEQ ID NO:417) derived from the coding sequence of SEQ ID NO:416 shown in FIG. 416.

[0476] FIG. 418 shows a nucleotide sequence (SEQ ID NO:418) of a native sequence PRO71238 cDNA, wherein SEQ ID NO:418 is a clone designated herein as “DNA304831”.

[0477] FIG. 419 shows the amino acid sequence (SEQ ID NO:419) derived from the coding sequence of SEQ ID NO:418 shown in FIG. 418.

[0478] FIG. 420A-B shows a nucleotide sequence (SEQ ID NO:420) of a native sequence PRO84718 cDNA, wherein SEQ ID NO:420 is a clone designated herein as “DNA329056”.

[0479] FIG. 421 shows the amino acid sequence (SEQ ID NO:421) derived from the coding sequence of SEQ ID NO:420 shown in FIG. 420.

[0480] FIG. 422 shows a nucleotide sequence (SEQ ID NO:422) of a native sequence PRO69632 cDNA, wherein SEQ ID NO:422 is a clone designated herein as “DNA287372”.

[0481] FIG. 423 shows the amino acid sequence (SEQ ID NO:423) derived from the coding sequence of SEQ ID NO:422 shown in FIG. 422.

[0482] FIG. 424A-B shows a nucleotide sequence (SEQ ID NO:424) of a native sequence PRO4913 cDNA, wherein SEQ ID NO:424 is a clone designated herein as “DNA103589”.

[0483] FIG. 425 shows the amino acid sequence (SEQ ID NO:425) derived from the coding sequence of SEQ ID NO:424 shown in FIG. 424A-B.

[0484] FIG. 426 shows a nucleotide sequence (SEQ ID NO:426) of a native sequence PRO84265 cDNA, wherein SEQ ID NO:426 is a clone designated herein as “DNA328427”.

[0485] FIG. 427 shows the amino acid sequence (SEQ ID NO:427) derived from the coding sequence of SEQ ID NO:426 shown in FIG. 426.

[0486] FIG. 428 shows a nucleotide sequence (SEQ ID NO:428) of a native sequence PRO84719 cDNA, wherein SEQ ID NO:428 is a clone designated herein as “DNA329057”.

[0487] FIG. 429 shows the amino acid sequence (SEQ ID NO:429) derived from the coding sequence of SEQ ID NO:428 shown in FIG. 428.

[0488] FIG. 430 shows a nucleotide sequence (SEQ ID NO:430) of a native sequence PRO57922 cDNA, wherein SEQ ID NO:430 is a clone designated herein as “DNA327568”.

[0489] FIG. 431 shows the amino acid sequence (SEQ ID NO:431) derived from the coding sequence of SEQ ID NO:430 shown in FIG. 430.

[0490] FIG. 432 shows a nucleotide sequence (SEQ ID NO:432) of a native sequence PRO12613 cDNA, wherein SEQ ID NO:432 is a clone designated herein as “DNA151139”.

[0491] FIG. 433 shows the amino acid sequence (SEQ ID NO:433) derived from the coding sequence of SEQ ID NO:432 shown in FIG. 432.

[0492] FIG. 434 shows a nucleotide sequence (SEQ ID NO:434) of a native sequence PRO62312 cDNA, wherein SEQ ID NO:434 is a clone designated herein as “DNA329058”.

[0493] FIG. 435 shows the amino acid sequence (SEQ ID NO:435) derived from the coding sequence of SEQ ID NO:434 shown in FIG. 434.

[0494] FIG. 436A-B shows a nucleotide sequence (SEQ ID NO:436) of a native sequence PRO60891 cDNA, wherein SEQ ID NO:436 is a clone designated herein as “DNA272786”.

[0495] FIG. 437 shows the amino acid sequence (SEQ ID NO:437) derived from the coding sequence of SEQ ID NO:436 shown in FIG. 436A-B.

[0496] FIG. 438A-B shows a nucleotide sequence (SEQ ID NO:438) of a native sequence PRO84720 cDNA, wherein SEQ ID NO:438 is a clone designated herein as “DNA329059”.

[0497] FIG. 439 shows the amino acid sequence (SEQ ID NO:439) derived from the coding sequence of SEQ ID NO:438 shown in FIG. 438A-B.

[0498] FIG. 440A-B shows a nucleotide sequence (SEQ ID NO:440) of a native sequence PRO84721 cDNA, wherein SEQ ID NO:440 is a clone designated herein as “DNA329060”.

[0499] FIG. 441 shows the amino acid sequence (SEQ ID NO:441) derived from the coding sequence of SEQ ID NO:440 shown in FIG. 440.

[0500] FIG. 442A-B shows a nucleotide sequence (SEQ ID NO:442) of a native sequence PRO84722 cDNA, wherein SEQ ID NO:442 is a clone designated herein as “DNA329061”.

[0501] FIG. 443 shows the amino acid sequence (SEQ ID NO:443) derived from the coding sequence of SEQ ID NO:442 shown in FIG. 442A-B.

[0502] FIG. 444A-B shows a nucleotide sequence (SEQ ID NO:444) of a native sequence PRO4854 cDNA, wherein SEQ ID NO:444 is a clone designated herein as “DNA103527”.

[0503] FIG. 445 shows the amino acid sequence (SEQ ID NO:445) derived from the coding sequence of SEQ ID NO:444 shown in FIG. 444A-B.

[0504] FIG. 446A-B shows a nucleotide sequence (SEQ ID NO:446) of a native sequence PRO59611 cDNA, wherein SEQ ID NO:446 is a clone designated herein as “DNA271304”.

[0505] FIG. 447 shows the amino acid sequence (SEQ ID NO:447) derived from the coding sequence of SEQ ID NO:446 shown in FIG. 446A-B.

[0506] FIG. 448 shows a nucleotide sequence (SEQ ID NO:448) of a native sequence PRO60271 cDNA, wherein SEQ ID NO:448 is a clone designated herein as “DNA271996”.

[0507] FIG. 449 shows the amino acid sequence (SEQ ID NO:449) derived from the coding sequence of SEQ ID NO:448 shown in FIG. 448.

[0508] FIG. 450A-B shows a nucleotide sequence (SEQ ID NO:450) of a native sequence PRO63074 cDNA, wherein SEQ ID NO:450 is a clone designated herein as “DNA329062”.

[0509] FIG. 451 shows the amino acid sequence (SEQ ID NO:451) derived from the coding sequence of SEQ ID NO:450 shown in FIG. 450A-B.

[0510] FIG. 452 shows a nucleotide sequence (SEQ ID NO:452) of a native sequence PRO84723 cDNA, wherein SEQ ID NO:452 is a clone designated herein as “DNA329063”.

[0511] FIG. 453 shows the amino acid sequence (SEQ ID NO:453) derived from the coding sequence of SEQ ID NO:452 shown in FIG. 452.

[0512] FIG. 454 shows a nucleotide sequence (SEQ ID NO:454) of a native sequence PRO84724 cDNA, wherein SEQ ID NO:454 is a clone designated herein as “DNA329064”.

[0513] FIG. 455 shows the amino acid sequence (SEQ ID NO:455) derived from the coding sequence of SEQ ID NO:454 shown in FIG. 454.

[0514] FIG. 456 shows a nucleotide sequence (SEQ ID NO:456) of a native sequence PRO35972 cDNA, wherein SEQ ID NO:456 is a clone designated herein as “DNA225509”.

[0515] FIG. 457 shows the amino acid sequence (SEQ ID NO:457) derived from the coding sequence of SEQ ID NO:456 shown in FIG. 456.

[0516] FIG. 458 shows a nucleotide sequence (SEQ ID NO:458) of a native sequence cDNA, wherein SEQ ID NO:458 is a clone designated herein as “DNA269599”.

[0517] FIG. 459 shows a nucleotide sequence (SEQ ID NO:459) of a native sequence PRO84434 cDNA, wherein SEQ ID NO:459 is a clone designated herein as “DNA328660”.

[0518] FIG. 460 shows the amino acid sequence (SEQ ID NO:460) derived from the coding sequence of SEQ ID NO:459 shown in FIG. 459.

[0519] FIG. 461 shows a nucleotide sequence (SEQ ID NO:461) of a native sequence PRO59476 cDNA, wherein SEQ ID NO:461 is a clone designated herein as “DNA271155”.

[0520] FIG. 462 shows the amino acid sequence (SEQ ID NO:462) derived from the coding sequence of SEQ ID NO:461 shown in FIG. 461.

[0521] FIG. 463A-B shows a nucleotide sequence (SEQ ID NO:463) of a native sequence PRO84725 cDNA, wherein SEQ ID NO:463 is a clone designated herein as “DNA329065”.

[0522] FIG. 464 shows the amino acid sequence (SEQ ID NO:464) derived from the coding sequence of SEQ ID NO:463 shown in FIG. 463A-B.

[0523] FIG. 465 shows a nucleotide sequence (SEQ ID NO:465) of a native sequence PRO84726 cDNA, wherein SEQ ID NO:465 is a clone designated herein as “DNA329066”.

[0524] FIG. 466 shows the amino acid sequence (SEQ ID NO:466) derived from the coding sequence of SEQ ID NO:465 shown in FIG. 465.

[0525] FIG. 467 shows a nucleotide sequence (SEQ ID NO:467) of a native sequence PRO84727 cDNA, wherein SEQ ID NO:467 is a clone designated herein as “DNA329067”.

[0526] FIG. 468 shows the amino acid sequence (SEQ ID NO:468) derived from the coding sequence of SEQ ID NO:467 shown in FIG. 467.

[0527] FIG. 469A-B shows a nucleotide sequence (SEQ ID NO:469) of a native sequence cDNA, wherein SEQ ID NO:469 is a clone designated herein as “DNA329068”.

[0528] FIG. 470A-B shows a nucleotide sequence (SEQ ID NO:470) of a native sequence cDNA, wherein SEQ ID NO:470 is a clone designated herein as “DNA329069”.

[0529] FIG. 471A-C shows a nucleotide sequence (SEQ ID NO:471) of a native sequence PRO84728 cDNA, wherein SEQ ID NO:471 is a clone designated herein as “DNA329070”.

[0530] FIG. 472 shows the amino acid sequence (SEQ ID NO:472) derived from the coding sequence of SEQ ID NO:471 shown in FIG. 471.

[0531] FIG. 473 shows a nucleotide sequence (SEQ ID NO:473) of a native sequence PRO84729 cDNA, wherein SEQ ID NO:473 is a clone designated herein as “DNA329071”.

[0532] FIG. 474 shows the amino acid sequence (SEQ ID NO:474) derived from the coding sequence of SEQ ID NO:473 shown in FIG. 473.

[0533] FIG. 475 shows a nucleotide sequence (SEQ ID NO:475) of a native sequence PRO84730 cDNA, wherein SEQ ID NO:475 is a clone designated herein as “DNA329072”.

[0534] FIG. 476 shows the amino acid sequence (SEQ ID NO:476) derived from the coding sequence of SEQ ID NO:475 shown in FIG. 475.

[0535] FIG. 477 shows a nucleotide sequence (SEQ ID NO:477) of a native sequence PRO84731 cDNA, wherein SEQ ID NO:477 is a clone designated herein as “DNA329073”.

[0536] FIG. 478 shows the amino acid sequence (SEQ ID NO:478) derived from the coding sequence of SEQ ID NO:477 shown in FIG. 477.

[0537] FIG. 479 shows a nucleotide sequence (SEQ ID NO:479) of a native sequence PRO21326 cDNA, wherein SEQ ID NO:479 is a clone designated herein as “DNA329074”.

[0538] FIG. 480 shows the amino acid sequence (SEQ ID NO:480) derived from the coding sequence of SEQ ID NO:479 shown in FIG. 479.

[0539] FIG. 481A-B shows a nucleotide sequence (SEQ ID NO:481) of a native sequence PRO69478 cDNA, wherein SEQ ID NO:481 is a clone designated herein as “DNA287192”.

[0540] FIG. 482 shows the amino acid sequence (SEQ ID NO:482) derived from the coding sequence of SEQ ID NO:481 shown in FIG. 481A-B.

[0541] FIG. 483 shows a nucleotide sequence (SEQ ID NO:483) of a native sequence PRO80846 cDNA, wherein SEQ ID NO:483 is a clone designated herein as “DNA324145”.

[0542] FIG. 484 shows the amino acid sequence (SEQ ID NO:484) derived from the coding sequence of SEQ ID NO:483 shown in FIG. 483.

[0543] FIG. 485 shows a nucleotide sequence (SEQ ID NO:485) of a native sequence PRO84611 cDNA, wherein SEQ ID NO:485 is a clone designated herein as “DNA328887”.

[0544] FIG. 486 shows the amino acid sequence (SEQ ID NO:486) derived from the coding sequence of SEQ ID NO:485 shown in FIG. 485.

[0545] FIG. 487 shows a nucleotide sequence (SEQ ID NO:487) of a native sequence PRO61948 cDNA, wherein SEQ ID NO:487 is a clone designated herein as “DNA274002”.

[0546] FIG. 488 shows the amino acid sequence (SEQ ID NO:488) derived from the coding sequence of SEQ ID NO:487 shown in FIG. 487.

[0547] FIG. 489 shows a nucleotide sequence (SEQ ID NO:489) of a native sequence PRO84732 cDNA, wherein SEQ ID NO:489 is a clone designated herein as “DNA329075”.

[0548] FIG. 490 shows the amino acid sequence (SEQ ID NO:490) derived from the coding sequence of SEQ ID NO:489 shown in FIG. 489.

[0549] FIG. 491A-B shows a nucleotide sequence (SEQ ID NO:491) of a native sequence PRO84733 cDNA, wherein SEQ ID NO:491 is a clone designated herein as “DNA329076”.

[0550] FIG. 492 shows the amino acid sequence (SEQ ID NO:492) derived from the coding sequence of SEQ ID NO:491 shown in FIG. 491.

[0551] FIG. 493 shows a nucleotide sequence (SEQ ID NO:493) of a native sequence PRO59776 cDNA, wherein SEQ ID NO:493 is a clone designated herein as “DNA271483”.

[0552] FIG. 494 shows the amino acid sequence (SEQ ID NO:494) derived from the coding sequence of SEQ ID NO:493 shown in FIG. 493.

[0553] FIG. 495 shows a nucleotide sequence (SEQ ID NO:495) of a native sequence PRO84734 cDNA, wherein SEQ ID NO:495 is a clone designated herein as “DNA329077”.

[0554] FIG. 496 shows the amino acid sequence (SEQ ID NO:496) derived from the coding sequence of SEQ ID NO:495 shown in FIG. 495.

[0555] FIG. 497 shows a nucleotide sequence (SEQ ID NO:497) of a native sequence PRO83839 cDNA, wherein SEQ ID NO:497 is a clone designated herein as “DNA327904”.

[0556] FIG. 498 shows the amino acid sequence (SEQ ID NO:498) derived from the coding sequence of SEQ ID NO:497 shown in FIG. 497.

[0557] FIG. 499 shows a nucleotide sequence (SEQ ID NO:499) of a native sequence PRO69472 cDNA, wherein SEQ ID NO:499 is a clone designated herein as “DNA287186”.

[0558] FIG. 500 shows the amino acid sequence (SEQ ID NO:500) derived from the coding sequence of SEQ ID NO:499 shown in FIG. 499.

[0559] FIG. 501 shows a nucleotide sequence (SEQ ID NO:501) of a native sequence PRO23253 cDNA, wherein SEQ ID NO:501 is a clone designated herein as “DNA329078”.

[0560] FIG. 502 shows the amino acid sequence (SEQ ID NO:502) derived from the coding sequence of SEQ ID NO:501 shown in FIG. 501.

[0561] FIG. 503 shows a nucleotide sequence (SEQ ID NO:503) of a native sequence PRO84735 cDNA, wherein SEQ ID NO:503 is a clone designated herein as “DNA329079”.

[0562] FIG. 504 shows the amino acid sequence (SEQ ID NO:504) derived from the coding sequence of SEQ ID NO:503 shown in FIG. 503.

[0563] FIG. 505 shows a nucleotide sequence (SEQ ID NO:505) of a native sequence PRO37583 cDNA, wherein SEQ ID NO:505 is a clone designated herein as “DNA227120”.

[0564] FIG. 506 shows the amino acid sequence (SEQ ID NO:506) derived from the coding sequence of SEQ ID NO:505 shown in FIG. 505.

### DETAILED DESCRIPTION OF THE PREFERRED EMBODIMENTS

I. Definitions

[0565] The terms “PRO polypeptide” and “PRO” as used herein and when immediately followed by a numerical designation refer to various polypeptides, wherein the complete designation (i.e., PRO/number) refers to specific polypeptide sequences as described herein. The terms “PRO/number polypeptide” and “PRO/number” wherein the term “number” is provided as an actual numerical designation as used herein encompass native sequence polypeptides and polypeptide variants (which are further defined herein). The PRO polypeptides described herein may be isolated from a variety of sources, such as from human tissue types or from another source, or prepared by recombinant or synthetic methods. The term “PRO polypeptide” refers to each individual PRO/number polypeptide disclosed herein. All disclosures in this specification which refer to the “PRO polypeptide” refer to each of the polypeptides individually as well as jointly. For example, descriptions of the preparation of, purification of, derivation of, formation of antibodies to or against, administration of, compositions containing, treatment of a disease with, etc., pertain to each polypeptide of the invention individually. The term “PRO polypeptide” also includes variants of the PRO/number polypeptides disclosed herein.

[0566] A “native sequence PRO polypeptide” comprises a polypeptide having the same amino acid sequence as the corresponding PRO polypeptide derived from nature. Such native sequence PRO polypeptides can be isolated from nature or can be produced by recombinant or synthetic means. The term “native sequence PRO polypeptide” specifically encompasses naturally-occurring truncated or secreted forms of the specific PRO polypeptide (e.g., an extracellular domain sequence), naturally-occurring variant forms (e.g., alternatively spliced forms) and naturally-occurring allelic variants of the polypeptide. In various embodiments of the invention, the native sequence PRO polypeptides disclosed herein are mature or full-length native sequence polypeptides comprising the full-length amino acids sequences shown in the accompanying figures. Start and stop codons are shown in bold font and underlined in the figures. However, while the PRO polypeptide disclosed in the accompanying figures are shown to begin with methionine residues designated herein as amino acid position 1 in the figures, it is conceivable and possible that other methionine residues located either upstream or downstream from the amino acid position 1 in the figures may be employed as the starting amino acid residue for the PRO polypeptides.

[0567] The PRO polypeptide “extracellular domain” or “ECD” refers to a form of the PRO polypeptide which is essentially free of the transmembrane and cytoplasmic domains. Ordinarily, a PRO polypeptide ECD will have less than 1% of such transmembrane and/or cytoplasmic domains and preferably, will have less than 0.5% of such domains. It will be understood that any transmembrane domains identified for the PRO polypeptides of the present invention are identified pursuant to criteria routinely employed in the art for identifying that type of hydrophobic domain. The exact boundaries of a transmembrane domain may vary but most likely by no more than about 5 amino acids at either end of the domain as initially identified herein. Optionally, therefore, an extracellular domain of a PRO polypeptide may contain from about 5 or fewer amino acids on either side of the transmembrane domain/extracellular domain boundary as identified in the Examples or specification and such polypeptides, with or without the associated signal peptide, and nucleic acid encoding them, are contemplated by the present invention.

[0568] The approximate location of the “signal peptides” of the various PRO polypeptides disclosed herein are shown in the present specification and/or the accompanying figures. It is noted, however, that the C-terminal boundary of a signal peptide may vary, but most likely by no more than about 5 amino acids on either side of the signal peptide C-terminal boundary as initially identified herein, wherein the C-terminal boundary of the signal peptide may be identified pursuant to criteria routinely employed in the art for identifying that type of amino acid sequence element (e.g., Nielsen et al., Prot. Eng. 10:1-6 (1997) and von Heinje et al., Nucl. Acids. Res. 14:4683-4690 (1986)). Moreover, it is also recognized that, in some cases, cleavage of a signal sequence from a secreted polypeptide is not entirely uniform, resulting in more than one secreted species. These mature polypeptides, where the signal peptide is cleaved within no more than about 5 amino acids on either side of the C-terminal boundary of the signal peptide as identified herein, and the polynucleotides encoding them, are contemplated by the present invention.

[0569] “PRO polypeptide variant” means an active PRO polypeptide as defined above or below having at least about 80% amino acid sequence identity with a full-length native sequence PRO polypeptide sequence as disclosed herein, a PRO polypeptide sequence lacking the signal peptide as disclosed herein, an extracellular domain of a PRO polypeptide, with or without the signal peptide, as disclosed herein or any other fragment of a full-length PRO polypeptide sequence as disclosed herein. Such PRO polypeptide variants include, for instance, PRO polypeptides wherein one or more amino acid residues are added, or deleted, at the N- or C-terminus of the full-length native amino acid sequence. Ordinarily, a PRO polypeptide variant will have at least about 80% amino acid sequence identity, alternatively at least about 81% amino acid sequence identity, alternatively at least about 82% amino acid sequence identity, alternatively at least about 83% amino acid sequence identity, alternatively at least about 84% amino acid sequence identity, alternatively at least about 85% amino acid sequence identity, alternatively at least about 86% amino acid sequence identity, alternatively at least about 87% amino acid sequence identity, alternatively at least about 88% amino acid sequence identity, alternatively at least about 89% amino acid sequence identity, alternatively at least about 90% amino acid sequence identity, alternatively at least about 91% amino acid sequence identity, alternatively at least about 92% amino acid sequence identity, alternatively at least about 93% amino acid sequence identity, alternatively at least about 94% amino acid sequence identity, alternatively at least about 95% amino acid sequence identity, alternatively at least about 96% amino acid sequence identity, alternatively at least about 97% amino acid sequence identity, alternatively at least about 98% amino acid sequence identity and alternatively at least about 99% amino acid sequence identity to a full-length native sequence PRO polypeptide sequence as disclosed herein, a PRO polypeptide sequence lacking the signal peptide as disclosed herein, an extracellular domain of a PRO polypeptide, with or without the signal peptide, as disclosed herein or any other specifically defined fragment of a full-length PRO polypeptide sequence as disclosed herein. Ordinarily, PRO variant polypeptides are at least about 10 amino acids in length, alternatively at least about 20 amino acids in length, alternatively at least about 30 amino acids in length, alternatively at least about 40 amino acids in length, alternatively at least about 50 amino acids in length, alternatively at least about 60 amino acids in length, alternatively at least about 70 amino acids in length, alternatively at least about 80 amino acids in length, alternatively at least about 90 amino acids in length, alternatively at least about 100 amino acids in length, alternatively at least about 150 amino acids in length, alternatively at least about 200 amino acids in length, alternatively at least about 300 amino acids in length, or more.

[0570] “Percent (%) amino acid sequence identity” with respect to the PRO polypeptide sequences identified herein is defined as the percentage of amino acid residues in a candidate sequence that are identical with the amino acid residues in the specific PRO polypeptide sequence, after aligning the sequences and introducing gaps, if necessary, to achieve the maximum percent sequence identity, and not considering any conservative substitutions as part of the sequence identity. Alignment for purposes of determining percent amino acid sequence identity can be achieved in various ways that are within the skill in the art, for instance, using publicly available computer software such as BLAST, BLAST-2, ALIGN or Megalign (DNASTAR) software. Those skilled in the art can determine appropriate parameters for measuring alignment, including any algorithms needed to achieve maximal alignment over the full length of the sequences being compared. For purposes herein, however, % amino acid sequence identity values are generated using the sequence comparison computer program ALIGN-2, wherein the complete source code for the ALIGN-2 program is provided in Table 1 below. The ALIGN-2 sequence comparison computer program was authored by Genentech, Inc. and the source code shown in Table 1 below has been filed with user documentation in the U.S. Copyright Office, Washington D.C., 20559, where it is registered under U.S. Copyright Registration No. TXU510087. The ALIGN-2 program is publicly available through Genentech, Inc., South San Francisco, Calif. or may be compiled from the source code provided in Table 1 below. The ALIGN-2 program should be compiled for use on a UNIX operating system, preferably digital UNIX V4.0D. All sequence comparison parameters are set by the ALIGN-2 program and do not vary.

[0571] In situations where ALIGN-2 is employed for amino acid sequence comparisons, the % amino acid sequence identity of a given amino acid sequence A to, with, or against a given amino acid sequence B (which can alternatively be phrased as a given amino acid sequence A that has or comprises a certain % amino acid sequence identity to, with, or against a given amino acid sequence B) is calculated as follows:
100 times the fraction X/Y
where X is the number of amino acid residues scored as identical matches by the sequence alignment program ALIGN-2 in that program's alignment of A and B, and where Y is the total number of amino acid residues in B. It will be appreciated that where the length of amino acid sequence A is not equal to the length of amino acid sequence B, the % amino acid sequence identity of A to B will not equal the % amino acid sequence identity of B to A. As examples of % amino acid sequence identity calculations using this method, Tables 2 and 3 demonstrate how to calculate the % amino acid sequence identity of the amino acid sequence designated “Comparison Protein” to the amino acid sequence designated “PRO”, wherein “PRO” represents the amino acid sequence of a hypothetical PRO polypeptide of interest, “Comparison Protein” represents the amino acid sequence of a polypeptide against which the “PRO” polypeptide of interest is being compared, and “X, “Y” and “Z” each represent different hypothetical amino acid residues.

[0572] Unless specifically stated otherwise, all % amino acid sequence identity values used herein are obtained as described in the immediately preceding paragraph using the ALIGN-2 computer program. However, % amino acid sequence identity values may also be obtained as described below by using the WU-BLAST-2 computer program (Altschul et al., Methods in Enzymology 266:460-480 (1996)). Most of the WU-BLAST-2 search parameters are set to the default values. Those not set to default values, i.e., the adjustable parameters, are set with the following values: overlap span=1, overlap fraction=0.125, word threshold (T)=11, and scoring matrix=BLOSUM62. When WU-BLAST-2 is employed, a % amino acid sequence identity value is determined by dividing (a) the number of matching identical amino acid residues between the amino acid sequence of the PRO polypeptide of interest having a sequence derived from the native PRO polypeptide and the comparison amino acid sequence of interest (i.e., the sequence against which the PRO polypeptide of interest is being compared which may be a PRO variant polypeptide) as determined by WU-BLAST-2 by (b) the total number of amino acid residues of the PRO polypeptide of interest. For example, in the statement “a polypeptide comprising an the amino acid sequence A which has or having at least 80% amino acid sequence identity to the amino acid sequence B”, the amino acid sequence A is the comparison amino acid sequence of interest and the amino acid sequence B is the amino acid sequence of the PRO polypeptide of interest.

[0573] Percent amino acid sequence identity may also be determined using the sequence comparison program NCBI-BLAST2 (Altschul et al., Nucleic Acids Res. 25:3389-3402 (1997)). The NCBI-BLAST2 sequence comparison program may be downloaded from http://www.ncbi.nlm.nih.gov or otherwise obtained from the National Institute of Health, Bethesda, Md. NCBI-BLAST2 uses several search parameters, wherein all of those search parameters are set to default values including, for example, unmask=yes, strand=all, expected occurrences=10, minimum low complexity length=15/5, multi-pass e-value=0.01, constant for multi-pass=25, dropoff for final gapped alignment=25 and scoring matrix=BLOSUM62.

[0574] In situations where NCBI-BLAST2 is employed for amino acid sequence comparisons, the % amino acid sequence identity of a given amino acid sequence A to, with, or against a given amino acid sequence B (which can alternatively be phrased as a given amino acid sequence A that has or comprises a certain % amino acid sequence identity to, with, or against a given amino acid sequence B) is calculated as follows:
100 times the fraction X/Y
where X is the number of amino acid residues scored as identical matches by the sequence alignment program NCBI-BLAST2 in that program's alignment of A and B, and where Y is the total number of amino acid residues in B. It will be appreciated that where the length of amino acid sequence A is not equal to the length of amino acid sequence B, the % amino acid sequence identity of A to B will not equal the % amino acid sequence identity of B to A.

[0575] “PRO variant polynucleotide” or “PRO variant nucleic acid sequence” means a nucleic acid molecule which encodes an active PRO polypeptide as defined below and which has at least about 80% nucleic acid sequence identity with a nucleotide acid sequence encoding a full-length native sequence PRO polypeptide sequence as disclosed herein, a full-length native sequence PRO polypeptide sequence lacking the signal peptide as disclosed herein, an extracellular domain of a PRO polypeptide, with or without the signal peptide, as disclosed herein or any other fragment of a full-length PRO polypeptide sequence as disclosed herein. Ordinarily, a PRO variant polynucleotide will have at least about 80% nucleic acid sequence identity, alternatively at least about 81% nucleic acid sequence identity, alternatively at least about 82% nucleic acid sequence identity, alternatively at least about 83% nucleic acid sequence identity, alternatively at least about 84% nucleic acid sequence identity, alternatively at least about 85% nucleic acid sequence identity, alternatively at least about 86% nucleic acid sequence identity, alternatively at least about 87% nucleic acid sequence identity, alternatively at least about 88% nucleic acid sequence identity, alternatively at least about 89% nucleic acid sequence identity, alternatively at least about 90% nucleic acid sequence identity, alternatively at least about 91% nucleic acid sequence identity, alternatively at least about 92% nucleic acid sequence identity, alternatively at least about 93% nucleic acid sequence identity, alternatively at least about 94% nucleic acid sequence identity, alternatively at least about 95% nucleic acid sequence identity, alternatively at least about 96% nucleic acid sequence identity, alternatively at least about 97% nucleic acid sequence identity, alternatively at least about 98% nucleic acid sequence identity and alternatively at least about 99% nucleic acid sequence identity with a nucleic acid sequence encoding a full-length native sequence PRO polypeptide sequence as disclosed herein, a full-length native sequence PRO polypeptide sequence lacking the signal peptide as disclosed herein, an extracellular domain of a PRO polypeptide, with or without the signal sequence, as disclosed herein or any other fragment of a full-length PRO polypeptide sequence as disclosed herein. Variants do not encompass the native nucleotide sequence.

[0576] Ordinarily, PRO variant polynucleotides are at least about 30 nucleotides in length, alternatively at least about 60 nucleotides in length, alternatively at least about 90 nucleotides in length, alternatively at least about 120 nucleotides in length, alternatively at least about 150 nucleotides in length, alternatively at least about 180 nucleotides in length, alternatively at least about 210 nucleotides in length, alternatively at least about 240 nucleotides in length, alternatively at least about 270 nucleotides in length, alternatively at least about 300 nucleotides in length, alternatively at least about 450 nucleotides in length, alternatively at least about 600 nucleotides in length, alternatively at least about 900 nucleotides in length, or more.

[0577] “Percent (%) nucleic acid sequence identity” with respect to PRO-encoding nucleic acid sequences identified herein is defined as the percentage of nucleotides in a candidate sequence that are identical with the nucleotides in the PRO nucleic acid sequence of interest, after aligning the sequences and introducing gaps, if necessary, to achieve the maximum percent sequence identity. Alignment for purposes of determining percent nucleic acid sequence identity can be achieved in various ways that are within the skill in the art, for instance, using publicly available computer software such as BLAST, BLAST-2, ALIGN or Megalign (DNASTAR) software. For purposes herein, however, % nucleic acid sequence identity values are generated using the sequence comparison computer program ALIGN-2, wherein the complete source code for the ALIGN-2 program is provided in Table 1 below. The ALIGN-2 sequence comparison computer program was authored by Genentech, Inc. and the source code shown in Table 1 below has been filed with user documentation in the U.S. Copyright Office, Washington D.C., 20559, where it is registered under U.S. Copyright Registration No. TXU510087. The ALIGN-2 program is publicly available through Genentech, Inc., South San Francisco, Calif. or may be compiled from the source code provided in Table 1 below. The ALIGN-2 program should be compiled for use on a UNIX operating system, preferably digital UNIX V4.0D. All sequence comparison parameters are set by the ALIGN-2 program and do not vary.

[0578] In situations where ALIGN-2 is employed for nucleic acid sequence comparisons, the % nucleic acid sequence identity of a given nucleic acid sequence C to, with, or against a given nucleic acid sequence D (which can alternatively be phrased as a given nucleic acid sequence C that has or comprises a certain % nucleic acid sequence identity to, with, or against a given nucleic acid sequence D) is calculated as follows:
100 times the fraction W/Z
where W is the number of nucleotides scored as identical matches by the sequence alignment program ALIGN-2 in that program's alignment of C and D, and where Z is the total number of nucleotides in D. It will be appreciated that where the length of nucleic acid sequence C is not equal to the length of nucleic acid sequence D, the % nucleic acid sequence identity of C to D will not equal the % nucleic acid sequence identity of D to C. As examples of % nucleic acid sequence identity calculations, Tables 4 and 5, demonstrate how to calculate the % nucleic acid sequence identity of the nucleic acid sequence designated “Comparison DNA” to the nucleic acid sequence designated “PRO-DNA”, wherein “PRO-DNA” represents a hypothetical PRO-encoding nucleic acid sequence of interest, “Comparison DNA” represents the nucleotide sequence of a nucleic acid molecule against which the “PRO-DNA” nucleic acid molecule of interest is being compared, and “N”, “L” and “V” each represent different hypothetical nucleotides.

[0579] Unless specifically stated otherwise, all % nucleic acid sequence identity values used herein are obtained as described in the immediately preceding paragraph using the ALIGN-2 computer program. However, % nucleic acid sequence identity values may also be obtained as described below by using the WU-BLAST-2 computer program (Altschul et al., Methods in Enzymology 266:460-480 (1996)). Most of the WU-BLAST-2 search parameters are set to the default values. Those not set to default values, i.e., the adjustable parameters, are set with the following values: overlap span=1, overlap fraction=0.125, word threshold (T)=11, and scoring matrix=BLOSUM62. When WU-BLAST-2 is employed, a % nucleic acid sequence identity value is determined by dividing (a) the number of matching identical nucleotides between the nucleic acid sequence of the PRO polypeptide-encoding nucleic acid molecule of interest having a sequence derived from the native sequence PRO polypeptide-encoding nucleic acid and the comparison nucleic acid molecule of interest (i.e., the sequence against which the PRO polypeptide-encoding nucleic acid molecule of interest is being compared which may be a variant PRO polynucleotide) as determined by WU-BLAST-2 by (b) the total number of nucleotides of the PRO polypeptide-encoding nucleic acid molecule of interest. For example, in the statement “an isolated nucleic acid molecule comprising a nucleic acid sequence A which has or having at least 80% nucleic acid sequence identity to the nucleic acid sequence B”, the nucleic acid sequence A is the comparison nucleic acid molecule of interest and the nucleic acid sequence B is the nucleic acid sequence of the PRO polypeptide-encoding nucleic acid molecule of interest.

[0580] Percent nucleic acid sequence identity may also be determined using the sequence comparison program NCBI-BLAST2 (Altschul et al., Nucleic Acids Res. 25:3389-3402 (1997)). The NCBI-BLAST2 sequence comparison program may be downloaded from http://www.ncbi.nlm.nih.gov or otherwise obtained from the National Institute of Health, Bethesda, Md. NCBI-BLAST2 uses several search parameters, wherein all of those search parameters are set to default values including, for example, unmask=yes, strand=all, expected occurrences=10, minimum low complexity length=15/5, multi-pass e-value=0.01, constant for multi-pass=25, dropoff for final gapped alignment=25 and scoring matrix=BLOSUM62.

[0581] In situations where NCBI-BLAST2 is employed for sequence comparisons, the % nucleic acid sequence identity of a given nucleic acid sequence C to, with, or against a given nucleic acid sequence D (which can alternatively be phrased as a given nucleic acid sequence C that has or comprises a certain % nucleic acid sequence identity to, with, or against a given nucleic acid sequence D) is calculated as follows:
100 times the fraction W/Z
where W is the number of nucleotides scored as identical matches by the sequence alignment program NCBI-BLAST2 in that program's alignment of C and D, and where Z is the total number of nucleotides in D. It will be appreciated that where the length of nucleic acid sequence C is not equal to the length of nucleic acid sequence D, the % nucleic acid sequence identity of C to D will not equal the % nucleic acid sequence identity of D to C.

[0582] In other embodiments, PRO variant polynucleotides are nucleic acid molecules that encode an active PRO polypeptide and which are capable of hybridizing, preferably under stringent hybridization and wash conditions, to nucleotide sequences encoding a full-length PRO polypeptide as disclosed herein. PRO variant polypeptides may be those that are encoded by a PRO variant polynucleotide.

[0583] “Isolated,” when used to describe the various polypeptides disclosed herein, means polypeptide that has been identified and separated and/or recovered from a component of its natural environment. Contaminant components of its natural environment are materials that would typically interfere with diagnostic or therapeutic uses for the polypeptide, and may include enzymes, hormones, and other proteinaceous or non-proteinaceous solutes. In preferred embodiments, the polypeptide will be purified (1) to a degree sufficient to obtain at least 15 residues of N-terminal or internal amino acid sequence by use of a spinning cup sequenator, or (2) to homogeneity by SDS-PAGE under non-reducing or reducing conditions using Coomassie blue or, preferably, silver stain. Isolated polypeptide includes polypeptide in situ within recombinant cells, since at least one component of the PRO polypeptide natural environment will not be present. Ordinarily, however, isolated polypeptide will be prepared by at least one purification step.

[0584] An “isolated” PRO polypeptide-encoding nucleic acid or other polypeptide-encoding nucleic acid is a nucleic acid molecule that is identified and separated from at least one contaminant nucleic acid molecule with which it is ordinarily associated in the natural source of the polypeptide-encoding nucleic acid. An isolated polypeptide-encoding nucleic acid molecule is other than in the form or setting in which it is found in nature. Isolated polypeptide-encoding nucleic acid molecules therefore are distinguished from the specific polypeptide-encoding nucleic acid molecule as it exists in natural cells. However, an isolated polypeptide-encoding nucleic acid molecule includes polypeptide-encoding nucleic acid molecules contained in cells that ordinarily express the polypeptide where, for example, the nucleic acid molecule is in a chromosomal location different from that of natural cells.

[0585] The term “control sequences” refers to DNA sequences necessary for the expression of an operably linked coding sequence in a particular host organism. The control sequences that are suitable for prokaryotes, for example, include a promoter, optionally an operator sequence, and a ribosome binding site. Eukaryotic cells are known to utilize promoters, polyadenylation signals, and enhancers.

[0586] Nucleic acid is “operably linked” when it is placed into a functional relationship with another nucleic acid sequence. For example, DNA for a presequence or secretory leader is operably linked to DNA for a polypeptide if it is expressed as a preprotein that participates in the secretion of the polypeptide; a promoter or enhancer is operably linked to a coding sequence if it affects the transcription of the sequence; or a ribosome binding site is operably linked to a coding sequence if it is positioned so as to facilitate translation. Generally, “operably linked” means that the DNA sequences being linked are contiguous, and, in the case of a secretory leader, contiguous and in reading phase. However, enhancers do not have to be contiguous. Linking is accomplished by ligation at convenient restriction sites. If such sites do not exist, the synthetic oligonucleotide adaptors or linkers are used in accordance with conventional practice.

[0587] The term “antibody” is used in the broadest sense and specifically covers, for example, single anti-PRO monoclonal antibodies (including agonist, antagonist, and neutralizing antibodies), anti-PRO antibody compositions with polyepitopic specificity, single chain anti-PRO antibodies, and fragments of anti-PRO antibodies (see below). The term “monoclonal antibody” as used herein refers to an antibody obtained from a population of substantially homogeneous antibodies, i.e., the individual antibodies comprising the population are identical except for possible naturally-occurring mutations that may be present in minor amounts.

[0588] “Stringency” of hybridization reactions is readily determinable by one of ordinary skill in the art, and generally is an empirical calculation dependent upon probe length, washing temperature, and salt concentration. In general, longer probes require higher temperatures for proper annealing, while shorter probes need lower temperatures. Hybridization generally depends on the ability of denatured DNA to reanneal when complementary strands are present in an environment below their melting temperature. The higher the degree of desired homology between the probe and hybridizable sequence, the higher the relative temperature which can be used. As a result, it follows that higher relative temperatures would tend to make the reaction conditions more stringent, while lower temperatures less so. For additional details and explanation of stringency of hybridization reactions, see Ausubel et al., Current Protocols in Molecular Biology, Wiley Interscience Publishers, (1995).

[0589] “Stringent conditions” or “high stringency conditions”, as defined herein, may be identified by those that: (I) employ low ionic strength and high temperature for washing, for example 0.015 M sodium chloride/0.0015 M sodium citrate/0.1% sodium dodecyl sulfate at 50° C.; (2) employ during hybridization a denaturing agent, such as formamide, for example, 50% (v/v) formamide with 0.1% bovine serum albumin/0.1% Ficoll/0.1% polyvinylpyrrolidone/50 mM sodium phosphate buffer at pH 6.5 with 750 mM sodium chloride, 75 mM sodium citrate at 42° C.; or (3) employ 50% formamide, 5×SSC (0.75 M NaCl, 0.075 M sodium citrate), 50 mM sodium phosphate (pH 6.8), 0.1% sodium pyrophosphate, 5× Denhardt's solution, sonicated salmon sperm DNA (50 μg/ml), 0.1% SDS, and 10% dextran sulfate at 42° C., with washes at 42° C. in 0.2×SSC (sodium chloride/sodium citrate) and 50% formamide at 55° C., followed by a high-stringency wash consisting of 0.1×SSC containing EDTA at 55° C.

[0590] “Moderately stringent conditions” may be identified as described by Sambrook et al., Molecular Cloning: A Laboratory Manual, New York: Cold Spring Harbor Press, 1989, and include the use of washing solution and hybridization conditions (e.g., temperature, ionic strength and % SDS) less stringent that those described above. An example of moderately stringent conditions is overnight incubation at 37° C. in a solution comprising: 20% formamide, 5×SSC (150 mM NaCl, 15 mM trisodium citrate), 50 mM sodium phosphate (pH 7.6), 5× Denhardt's solution, 10% dextran sulfate, and 20 mg/ml denatured sheared salmon sperm DNA, followed by washing the filters in 1×SSC at about 37-50° C. The skilled artisan will recognize how to adjust the temperature, ionic strength, etc. as necessary to accommodate factors such as probe length and the like.

[0591] The term “epitope tagged” when used herein refers to a chimeric polypeptide comprising a PRO polypeptide fused to a “tag polypeptide”. The tag polypeptide has enough residues to provide an epitope against which an antibody can be made, yet is short enough such that it does not interfere with activity of the polypeptide to which it is fused. The tag polypeptide preferably also is fairly unique so that the antibody does not substantially cross-react with other epitopes. Suitable tag polypeptides generally have at least six amino acid residues and usually between about 8 and 50 amino acid residues (preferably, between about 10 and 20 amino acid residues).

[0592] As used herein, the term “immunoadhesin” designates antibody-like molecules which combine the binding specificity of a heterologous protein (an “adhesin”) with the effector functions of immunoglobulin constant domains. Structurally, the immunoadhesins comprise a fusion of an amino acid sequence with the desired binding specificity which is other than the antigen recognition and binding site of an antibody (i.e., is “heterologous”), and an immunoglobulin constant domain sequence. The adhesin part of an immunoadhesin molecule typically is a contiguous amino acid sequence comprising at least the binding site of a receptor or a ligand. The immunoglobulin constant domain sequence in the immunoadhesin may be obtained from any immunoglobulin, such as IgG-1, IgG-2, IgG-3, or IgG-4 subtypes, IgA (including IgA-1 and IgA-2), IgE, IgD or IgM.

[0593] “Active” or “activity” for the purposes herein refers to form(s) of a PRO polypeptide which retain a biological and/or an immunological activity of native or naturally-occurring PRO, wherein “biological” activity refers to a biological function (either inhibitory or stimulatory) caused by a native or naturally-occurring PRO other than the ability to induce the production of an antibody against an antigenic epitope possessed by a native or naturally-occurring PRO and an “immunological” activity refers to the ability to induce the production of an antibody against an antigenic epitope possessed by a native or naturally-occurring PRO.

[0594] The term “antagonist” is used in the broadest sense, and includes any molecule that partially or fully blocks, inhibits, or neutralizes a biological activity of a native PRO polypeptide disclosed herein. In a similar manner, the term “agonist” is used in the broadest sense and includes any molecule that mimics a biological activity of a native PRO polypeptide disclosed herein. Suitable agonist or antagonist molecules specifically include agonist or antagonist antibodies or antibody fragments, fragments or amino acid sequence variants of native PRO polypeptides, peptides, antisense oligonucleotides, small organic molecules, etc. Methods for identifying agonists or antagonists of a PRO polypeptide may comprise contacting a PRO polypeptide with a candidate agonist or antagonist molecule and measuring a detectable change in one or more biological activities normally associated with the PRO polypeptide.

[0595] “Treatment” refers to both therapeutic treatment and prophylactic or preventative measures, wherein the object is to prevent or slow down (lessen) the targeted pathologic condition or disorder. Those in need of treatment include those already with the disorder as well as those prone to have the disorder or those in whom the disorder is to be prevented.

[0596] “Chronic” administration refers to administration of the agent(s) in a continuous mode as opposed to an acute mode, so as to maintain the initial therapeutic effect (activity) for an extended period of time. “Intermittent” administration is treatment that is not consecutively done without interruption, but rather is cyclic in nature.

[0597] “Mammal” for purposes of treatment refers to any animal classified as a mammal, including humans, domestic and farm animals, and zoo, sports, or pet animals, such as dogs, cats, cattle, horses, sheep, pigs, goats, rabbits, etc. Preferably, the mammal is human.

[0598] Administration “in combination with” one or more further therapeutic agents includes simultaneous (concurrent) and consecutive administration in any order.

[0599] “Carriers” as used herein include pharmaceutically acceptable carriers, excipients, or stabilizers which are nontoxic to the cell or mammal being exposed thereto at the dosages and concentrations employed. Often the physiologically acceptable carrier is an aqueous pH buffered solution. Examples of physiologically acceptable carriers include buffers such as phosphate, citrate, and other organic acids; antioxidants including ascorbic acid; low molecular weight (less than about 10 residues) polypeptide; proteins, such as serum albumin, gelatin, or immunoglobulins; hydrophilic polymers such as polyvinylpyrrolidone; amino acids such as glycine, glutamine, asparagine, arginine or lysine; monosaccharides, disaccharides, and other carbohydrates including glucose, mannose, or dextrins; chelating agents such as EDTA; sugar alcohols such as mannitol or sorbitol; salt-forming counterions such as sodium; and/or nonionic surfactants such as TWEEN™, polyethylene glycol (PEG), and PLURONICS™.

[0600] “Antibody fragments” comprise a portion of an intact antibody, preferably the antigen binding or variable region of the intact antibody. Examples of antibody fragments include Fab, Fab′, F(ab′)₂, and Fv fragments; diabodies; linear antibodies (Zapata et al., Protein Eng. 8(10): 1057-1062 [1995]); single-chain antibody molecules; and multispecific antibodies formed from antibody fragments.

[0601] Papain digestion of antibodies produces two identical antigen-binding fragments, called “Fab” fragments, each with a single antigen-binding site, and a residual “Fc” fragment, a designation reflecting the ability to crystallize readily. Pepsin treatment yields an F(ab′)₂ fragment that has two antigen-combining sites and is still capable of cross-linking antigen.

[0602] “Fv” is the minimum antibody fragment which contains a complete antigen-recognition and -binding site. This region consists of a dimer of one heavy- and one light-chain variable domain in tight, non-covalent association. It is in this configuration that the three CDRs of each variable domain interact to define an antigen-binding site on the surface of the V_{H}-V_{L} dimer. Collectively, the six CDRs confer antigen-binding specificity to the antibody. However, even a single variable domain (or half of an Fv comprising only three CDRs specific for an antigen) has the ability to recognize and bind antigen, although at a lower affinity than the entire binding site.

[0603] The Fab fragment also contains the constant domain of the light chain and the first constant domain (CH1) of the heavy chain. Fab fragments differ from Fab′ fragments by the addition of a few residues at the carboxy terminus of the heavy chain CH1 domain including one or more cysteines from the antibody hinge region. Fab′-SH is the designation herein for Fab′ in which the cysteine residue(s) of the constant domains bear a free thiol group. F(ab′)₂ antibody fragments originally were produced as pairs of Fab′ fragments which have hinge cysteines between them. Other chemical couplings of antibody fragments are also known.

[0604] The “light chains” of antibodies (immunoglobulins) from any vertebrate species can be assigned to one of two clearly distinct types, called kappa and lambda, based on the amino acid sequences of their constant domains.

[0605] Depending on the amino acid sequence of the constant domain of their heavy chains, immunoglobulins can be assigned to different classes. There are five major classes of immunoglobulins: IgA, IgD, IgE, IgG, and IgM, and several of these may be further divided into subclasses (isotypes), e.g., IgG1, IgG2, IgG3, IgG4, IgA, and IgA2.

[0606] “Single-chain Fv” or “sFv” antibody fragments comprise the V_{H} and V_{L} domains of antibody, wherein these domains are present in a single polypeptide chain. Preferably, the Fv polypeptide further comprises a polypeptide linker between the V_{H} and V_{L} domains which enables the sFv to form the desired structure for antigen binding. For a review of sFv, see Pluckthun in The Pharmacology of Monoclonal Antibodies. vol. 113, Rosenburg and Moore eds., Springer-Verlag, New York, pp. 269-315 (1994).

[0607] The term “diabodies” refers to small antibody fragments with two antigen-binding sites, which fragments comprise a heavy-chain variable domain (V_{H}) connected to a light-chain variable domain (V_{L}) in the same polypeptide chain (V_{H}-V_{L}). By using a linker that is too short to allow pairing between the two domains on the same chain, the domains are forced to pair with the complementary domains of another chain and create two antigen-binding sites. Diabodies are described more fully in, for example, EP 404,097; WO 93/11161; and Hollinger et al., Proc. Natl. Acad. Sci. USA, 90:6444-6448 (1993).

[0608] An “isolated” antibody is one which has been identified and separated and/or recovered from a component of its natural environment. Contaminant components of its natural environment are materials which would interfere with diagnostic or therapeutic uses for the antibody, and may include enzymes, hormones, and other proteinaceous or nonproteinaceous solutes. In preferred embodiments, the antibody will be purified (1) to greater than 95% by weight of antibody as determined by the Lowry method, and most preferably more than 99% by weight, (2) to a degree sufficient to obtain at least 15 residues of N-terminal or internal amino acid sequence by use of a spinning cup sequenator, or (3) to homogeneity by SDS-PAGE under reducing or nonreducing conditions using Coomassie blue or, preferably, silver stain. Isolated antibody includes the antibody in situ within recombinant cells since at least one component of the antibody's natural environment will not be present. Ordinarily, however, isolated antibody will be prepared by at least one purification step.

[0609] An antibody that “specifically binds to” or is “specific for” a particular polypeptide or an epitope on a particular polypeptide is one that binds to that particular polypeptide or epitope on a particular polypeptide without substantially binding to any other polypeptide or polypeptide epitope.

[0610] The word “label” when used herein refers to a detectable compound or composition which is conjugated directly or indirectly to the antibody so as to generate a “labeled” antibody. The label may be detectable by itself (e.g. radioisotope labels or fluorescent labels) or, in the case of an enzymatic label, may catalyze chemical alteration of a substrate compound or composition which is detectable.

[0611] By “solid phase” is meant a non-aqueous matrix to which the antibody of the present invention can adhere. Examples of solid phases encompassed herein include those formed partially or entirely of glass (e.g., controlled pore glass), polysaccharides (e.g., agarose), polyacrylamides, polystyrene, polyvinyl alcohol and silicones. In certain embodiments, depending on the context, the solid phase can comprise the well of an assay plate; in others it is a purification column (e.g., an affinity chromatography column). This term also includes a discontinuous solid phase of discrete particles, such as those described in U.S. Pat. No. 4,275,149.

[0612] A “liposome” is a small vesicle composed of various types of lipids, phospholipids and/or surfactant which is useful for delivery of a drug (such as a PRO polypeptide or antibody thereto) to a mammal. The components of the liposome are commonly arranged in a bilayer formation, similar to the lipid arrangement of biological membranes.

[0613] A “small molecule” is defined herein to have a molecular weight below about 500 Daltons.

[0614] The term “immune related disease” means a disease in which a component of the immune system of a mammal causes, mediates or otherwise contributes to a morbidity in the mammal. Also included are diseases in which stimulation or intervention of the immune response has an ameliorative effect on progression of the disease. Included within this term are immune-mediated inflammatory diseases, non-immune-mediated inflammatory diseases, infectious diseases, immunodeficiency diseases, neoplasia, etc.

[0615] The term “B cell mediated disease” means a disease in which B cells directly or indirectly mediate or otherwise contribute to a morbidity in a mammal. The B cell mediated disease may be associated with cell mediated effects, Ig mediated effects, and even effects associated with T cells if the T cells are stimulated, for example, by the lymphokines secreted by B cells.

[0616] Examples of immune-related and inflammatory diseases which are immune or B cell mediated, which may be treated according to the invention include: systemic lupus erythematosis, X-linked infantile hypogammaglobulinemia, polysaccaride antigen unresponsiveness, selective IgA deficiency, selective IgM deficiency, selective deficiency of IgG subclasses, immunodeficiency with hyper Ig-M, transient hypogammaglobulinemia of infancy, Burkin's lymphoma, Intermediate lymphoma, follicular lymphoma, typeII hypersensitivity, rheumatoid arthritis, autoimmune mediated hemolytic anemia, myesthenia gravis, hypoadrenocorticism, glomerulonephritis and ankylosing spondylitis.

[0617] The term “effective amount” is a concentration or amount of a PRO polypeptide and/or agonist/antagonist which results in achieving a particular stated purpose. An “effective amount” of a PRO polypeptide or agonist or antagonist thereof may be determined empirically. Furthermore, a “therapeutically effective amount” is a concentration or amount of a PRO polypeptide and/or agonist/antagonist which is effective for achieving a stated therapeutic effect. This amount may also be determined empirically.

[0618] The term “cytotoxic agent” as used herein refers to a substance that inhibits or prevents the function of cells and/or causes destruction of cells. The term is intended to include radioactive isotopes (e.g., I¹³¹, I¹²⁵, Y⁹⁰ and Re¹⁸⁶), chemotherapeutic agents, and toxins such as enzymatically active toxins of bacterial, fungal, plant or animal origin, or fragments thereof.

[0619] A “chemotherapeutic agent” is a chemical compound useful in the treatment of cancer. Examples of chemotherapeutic agents include adriamycin, doxorubicin, epirubicin, 5-fluorouracil, cytosine arabinoside (“Ara-C”), cyclophosphamide, thiotepa, busulfan, cytoxin, taxoids, e.g., paclitaxel (Taxol, Bristol-Myers Squibb Oncology, Princeton, N.J.), and doxetaxel (Taxotere, Rhone-Poulenc Rorer, Antony, France), toxotere, methotrexate, cisplatin, melphalan, vinblastine, bleomycin, etoposide, ifosfamide, mitomycin C, mitoxantrone, vincristine, vinorelbine, carboplatin, teniposide, daunomycin, carminomycin, aminopterin, dactinomycin, mitomycins, esperamicins (see U.S. Pat. No. 4,675,187), melphalan and other related nitrogen mustards. Also included in this definition are hormonal agents that act to regulate or inhibit hormone action on tumors such as tamoxifen and onapristone.

[0620] A “growth inhibitory agent” when used herein refers to a compound or composition which inhibits growth of a cell, especially cancer cell overexpressing any of the genes identified herein, either in vitro or in vivo. Thus, the growth inhibitory agent is one which significantly reduces the percentage of cells overexpressing such genes in S phase. Examples of growth inhibitory agents include agents that block cell cycle progression (at a place other than S phase), such as agents that induce G1 arrest and M-phase arrest. Classical M-phase blockers include the vincas (vincristine and vinblastine), taxol, and topo II inhibitors such as doxorubicin, epirubicin, daunorubicin, etoposide, and bleomycin. Those agents that arrest G1 also spill over into S-phase arrest, for example, DNA alkylating agents such as tamoxifen, prednisone, dacarbazine, mechlorethamine, cisplatin, methotrexate, 5-fluorouracil, and ara-C. Further information can be found in The Molecular Basis of Cancer, Mendelsohn and Israel, eds., Chapter 1, entitled “Cell cycle regulation, oncogens, and antineoplastic drugs” by Murakami et al. (WB Saunders: Philadelphia, 1995), especially p. 13.

[0621] The term “cytokine” is a generic term for proteins released by one cell population which act on another cell as intercellular mediators. Examples of such cytokines are lymphokines, monokines, and traditional polypeptide hormones. Included among the cytokines are growth hormone such as human growth hormone, N-methionyl human growth hormone, and bovine growth hormone; parathyroid hormone; thyroxine; insulin; proinsulin; relaxin; prorelaxin; glycoprotein hormones such as follicle stimulating hormone (FSH), thyroid stimulating hormone (TSH), and luteinizing hormone (LH); hepatic growth factor; fibroblast growth factor, prolactin; placental lactogen; tumor necrosis factor-α and -β; mullerian-inhibiting substance; mouse gonadotropin-associated peptide; inhibin; activin; vascular endothelial growth factor; integrin; thrombopoietin (TPO); nerve growth factors such as NGF-β; platelet-growth factor, transforming growth factors (TGFs) such as TGF-α and TGF-β; insulin-like growth factor-I and -II; erythropoietin (EPO); osteoinductive factors; interferons such as interferon-α, -β, and -γ; colony stimulating factors (CSFs) such as macrophage-CSF (M-CSF); granulocyte-macrophage-CSF (GM-CSF); and granulocyte-CSF (G-CSF); interleukins (ILs) such as IL-1, IL-1α, IL-2, IL-3, IL-4, IL-5, IL-6, IL-7, IL-8, IL-9, IL-11, IL-12; a tumor necrosis factor such as TNF-α or TNF-β; and other polypeptide factors including LIF and kit ligand (KL). As used herein, the term cytokine includes proteins from natural sources or from recombinant cell culture and biologically active equivalents of the native sequence cytokines.

[0622] As used herein, the term “immunoadhesin” designates antibody-like molecules which combine the binding specificity of a heterologous protein (an “adhesin”) with the effector functions of immunoglobulin constant domains. Structurally, the immunoadhesins comprise a fusion of an amino acid sequence with the desired binding specificity which is other than the antigen recognition and binding site of an antibody (i.e., is “heterologous”), and an immunoglobulin constant domain sequence. The adhesin part of an immunoadhesin molecule typically is a contiguous amino acid sequence comprising at least the binding site of a receptor or a ligand. The immunoglobulin constant domain sequence in the immunoadhesin may be obtained from any immunoglobulin, such as IgG-1, IgG-2, IgG-3, or IgG-4 subtypes, IgA (including IgA-1 and IgA-2), IgE, IgD or IgM.

[0623] As used herein, the term “inflammatory cells” designates cells that enhance the inflammatory response such as mononuclear cells, eosinophils, macrophages, and polymorphonuclear neutrophils (PMN).

TABLE 2

| | | |
|---|---|---|
| PRO | XXXXXXXXXXXXXXX | (Length = 15 amino acids) |
| Comparison | XXXXXYYYYYYY | (Length = 12 amino acids) |
| Protein | | |

% amino acid sequence identity = (the number of identically matching amino acid residues between the two polypeptide sequences as determined by ALIGN-2) divided by (the total number of amino acid residues of the PRO polypeptide) = 5 divided by 15 = 33.3%

[0624] TABLE 3

| | | |
|---|---|---|
| PRO | XXXXXXXXXX | (Length = 10 amino acids) |
| Comparison | XXXXXYYYYYYZZYZ | (Length = 15 amino acids) |
| Protein | | |

% amino acid sequence identity = (the number of identically matching amino acid residues between the two polypeptide sequences as determined by ALIGN-2) divided by (the total number of amino acid residues of the PRO polypeptide) = 5 divided by 10 = 50%

[0625] TABLE 4

| | | |
|---|---|---|
| PRO-DNA | NNNNNNNNNNNNNN | (Length = 14 nucleotides) |
| Comparison | NNNNNNLLLLLLLLLL | (Length = 16 nucleotides) |
| DNA | | |

% nucleic acid sequence identity = (the number of identically matching nucleotides between the two nucleic acid sequences as determined by ALIGN-2) divided by (the total number of nucleotides of the PRO-DNA nucleic acid sequence) = 6 divided by 14 = 42.9%

[0626] TABLE 5

| | | |
|---|---|---|
| PRO-DNA | NNNNNNNNNNNN | (Length = 12 nucleotides) |
| Comparison | NNNNLLLVV | (Length = 9 nucleotides) |
| DNA | | |

% nucleic acid sequence identity = the number of identically matching nucleotides between the two nucleic acid sequences as determined by ALIGN-2) divided by (the total number of nucleotides of the PRO-DNA nucleic acid sequence) = 4 divided by 12 = 33.3%

II. Compositions and Methods of the Invention

[0627] A. Full-Length PRO Polypeptides

[0628] The present invention provides newly identified and isolated nucleotide sequences encoding polypeptides referred to in the present application as PRO polypeptides. In particular, cDNAs encoding various PRO polypeptides have been identified and isolated, as disclosed in further detail in the Examples below. However, for sake of simplicity, in the present specification the protein encoded by the full length native nucleic acid molecules disclosed herein as well as all further native homologues and variants included in the foregoing definition of PRO, will be referred to as “PRO/number”, regardless of their origin or mode of preparation.

[0629] As disclosed in the Examples below, various cDNA clones have been disclosed. The predicted amino acid sequence can be determined from the nucleotide sequence using routine skill. For the PRO polypeptides and encoding nucleic acids described herein, Applicants have identified what is believed to be the reading frame best identifiable with the sequence information available at the time.

[0630] B. PRO Polypeptide Variants

[0631] In addition to the full-length native sequence PRO polypeptides described herein, it is contemplated that PRO variants can be prepared. PRO variants can be prepared by introducing appropriate nucleotide changes into the PRO DNA, and/or by synthesis of the desired PRO polypeptide. Those skilled in the art will appreciate that amino acid changes may alter post-translational processes of the PRO, such as changing the number or position of glycosylation sites or altering the membrane anchoring characteristics.

[0632] Variations in the native full-length sequence PRO or in various domains of the PRO described herein, can be made, for example, using any of the techniques and guidelines for conservative and non-conservative mutations set forth, for instance, in U.S. Pat. No. 5,364,934. Variations may be a substitution, deletion or insertion of one or more codons encoding the PRO that results in a change in the amino acid sequence of the PRO as compared with the native sequence PRO. Optionally, the variation is by substitution of at least one amino acid with any other amino acid in one or more of the domains of the PRO. Guidance in determining which amino acid residue may be inserted, substituted or deleted without adversely affecting the desired activity may be found by comparing the sequence of the PRO with that of homologous known protein molecules and minimizing the number of amino acid sequence changes made in regions of high homology. Amino acid substitutions can be the result of replacing one amino acid with another amino acid having similar structural and/or chemical properties, such as the replacement of a leucine with a serine, i.e., conservative amino acid replacements. Insertions or deletions may optionally be in the range of about 1 to 5 amino acids. The variation allowed may be determined by systematically making insertions, deletions or substitutions of amino acids in the sequence and testing the resulting variants for activity exhibited by the full-length or mature native sequence.

[0633] PRO polypeptide fragments are provided herein. Such fragments may be truncated at the N-terminus or C-terminus, or may lack internal residues, for example, when compared with a full length native protein. Certain fragments lack amino acid residues that are not essential for a desired biological activity of the PRO polypeptide.

[0634] PRO fragments may be prepared by any of a number of conventional techniques. Desired peptide fragments may be chemically synthesized. An alternative approach involves generating PRO fragments by enzymatic digestion, e.g., by treating the protein with an enzyme known to cleave proteins at sites defined by particular amino acid residues, or by digesting the DNA with suitable restriction enzymes and isolating the desired fragment. Yet another suitable technique involves isolating and amplifying a DNA fragment encoding a desired polypeptide fragment, by polymerase chain reaction (PCR). Oligonucleotides that define the desired termini of the DNA fragment are employed at the 5′ and 3′ primers in the PCR. Preferably, PRO polypeptide fragments share at least one biological and/or immunological activity with the native PRO polypeptide disclosed herein.

[0635] In particular embodiments, conservative substitutions of interest are shown in Table 6 under the heading of preferred substitutions. If such substitutions result in a change in biological activity, then more substantial changes, denominated exemplary substitutions in Table 6, or as further described below in reference to amino acid classes, are introduced and the products screened.

TABLE 6

| | | Preferred |
|---|---|---|
| Original Residue | Exemplary Substitutions | Substitutions |
| Ala (A) | val; leu; ile | val |
| Arg (R) | lys; gln; asn | lys |
| Asn (N) | gln; his; lys; arg | gln |
| Asp (D) | glu | glu |
| Cys (C) | ser | ser |
| Gln (Q) | asn | asn |
| Glu (E) | asp | asp |
| Gly (G) | pro; ala | ala |
| His (H) | asn; gln; lys; arg | arg |
| Ile (I) | leu; val; met; ala; phe; norleucine | leu |
| Leu (L) | norleucine; ile; val; met; ala; phe | ile |
| Lys (K) | arg; gln; asn | arg |
| Met (M) | leu; phe; ile | leu |
| Phe (F) | leu; val; ile; ala; tyr | leu |
| Pro (P) | ala | ala |
| Ser (S) | thr | thr |
| Thr (T) | ser | ser |
| Trp (W) | tyr; phe | tyr |
| Tyr (Y) | trp; phe; thr; ser | phe |
| Val (V) | ile; leu; met; phe; ala; norleucine | leu |

[0636] Substantial modifications in function or immunological identity of the PRO polypeptide are accomplished by selecting substitutions that differ significantly in their effect on maintaining (a) the structure of the polypeptide backbone in the area of the substitution, for example, as a sheet or helical conformation, (b) the charge or hydrophobicity of the molecule at the target site, or (c) the bulk of the side chain. Naturally occurring residues are divided into groups based on common side-chain properties:

(1) hydrophobic: norleucine, met, ala, val, leu, ile;

(2) neutral hydrophilic: cys, ser, thr;

(3) acidic: asp, glu;

(4) basic: asn, gln, his, lys, arg;

(5) residues that influence chain orientation: gly, pro; and

(6) aromatic: trp, tyr, phe.

[0637] Non-conservative substitutions will entail exchanging a member of one of these classes for another class. Such substituted residues also may be introduced into the conservative substitution sites or, more preferably, into the remaining (non-conserved) sites.

[0638] The variations can be made using methods known in the art such as oligonucleotide-mediated (site-directed) mutagenesis, alanine scanning, and PCR mutagenesis. Site-directed mutagenesis [Carter et al., Nucl. Acids Res., 13:4331 (1986); Zoller et al., Nucl. Acids Res., 10:6487 (1987)], cassette mutagenesis [Wells et al., Gene, 34:315 (1985)], restriction selection mutagenesis [Wells et al., Philos. Trans. R. Soc. London SerA, 317:415 (1986)] or other known techniques can be performed on the cloned DNA to produce the PRO variant DNA.

[0639] Scanning amino acid analysis can also be employed to identify one or more amino acids along a contiguous sequence. Among the preferred scanning amino acids are relatively small, neutral amino acids. Such amino acids include alanine, glycine, serine, and cysteine. Alanine is typically a preferred scanning amino acid among this group because it eliminates the side-chain beyond the beta-carbon and is less likely to alter the main-chain conformation of the variant [Cunningham and Wells, Science, 244: 1081-1085 (1989)]. Alanine is also typically preferred because it is the most common amino acid. Further, it is frequently found in both buried and exposed positions [Creighton, The Proteins, (W.H. Freeman & Co., N.Y.); Chothia, J. Mol. Biol., 150:1 (1976)]. If alanine substitution does not yield adequate amounts of variant, an isoteric amino acid can be used.

[0640] C. Modifications of PRO

[0641] Covalent modifications of PRO are included within the scope of this invention. One type of covalent modification includes reacting targeted amino acid residues of a PRO polypeptide with an organic derivatizing agent that is capable of reacting with selected side chains or the N- or C-terminal residues of the PRO. Derivatization with bifunctional agents is useful, for instance, for crosslinking PRO to a water-insoluble support matrix or surface for use in the method for purifying anti-PRO antibodies, and vice-versa. Commonly used crosslinking agents include, e.g., 1,1-bis(diazoacetyl)-2-phenylethane, glutaraldehyde, N-hydroxysuccinimide esters, for example, esters with 4-azidosalicylic acid, homobifunctional imidoesters, including disuccinimidyl esters such as 3,3′-dithiobis(succinimidylpropionate), bifunctional maleimides such as bis-N-maleimido-1,8-octane and agents such as methyl-3-[(p-azidophenyl)dithio]propioimidate.

[0642] Other modifications include deamidation of glutaminyl and asparaginyl residues to the corresponding glutamyl and aspartyl residues, respectively, hydroxylation of proline and lysine, phosphorylation of hydroxyl groups of seryl or threonyl residues, methylation of the α-amino groups of lysine, arginine, and histidine side chains [T. E. Creighton, Proteins: Structure and Molecular Properties, W.H. Freeman & Co., San Francisco, pp. 79-86 (1983)], acetylation of the N-terminal amine, and amidation of any C-terminal carboxyl group.

[0643] Another type of covalent modification of the PRO polypeptide included within the scope of this invention comprises altering the native glycosylation pattern of the polypeptide. “Altering the native glycosylation pattern” is intended for purposes herein to mean deleting one or more carbohydrate moieties found in native sequence PRO (either by removing the underlying glycosylation site or by deleting the glycosylation by chemical and/or enzymatic means), and/or adding one or more glycosylation sites that are not present in the native sequence PRO. In addition, the phrase includes qualitative changes in the glycosylation of the native proteins, involving a change in the nature and proportions of the various carbohydrate moieties present.

[0644] Addition of glycosylation sites to the PRO polypeptide may be accomplished by altering the amino acid sequence. The alteration may be made, for example, by the addition of, or substitution by, one or more serine or threonine residues to the native sequence PRO (for O-linked glycosylation sites). The PRO amino acid sequence may optionally be altered through changes at the DNA level, particularly by mutating the DNA encoding the PRO polypeptide at preselected bases such that codons are generated that will translate into the desired amino acids.

[0645] Another means of increasing the number of carbohydrate moieties on the PRO polypeptide is by chemical or enzymatic coupling of glycosides to the polypeptide. Such methods are described in the art, e.g., in WO 87/05330 published 11 Sep. 1987, and in Aplin and Wriston, CRC Crit. Rev. Biochem., pp. 259-306 (1981).

[0646] Removal of carbohydrate moieties present on the PRO polypeptide may be accomplished chemically or enzymatically or by mutational substitution of codons encoding for amino acid residues that serve as targets for glycosylation. Chemical deglycosylation techniques are known in the art and described, for instance, by Halimuddin, et al., Arch. Biochem. Biophys., 259:52 (1987) and by Edge et al., Anal. Biochem., 118:131 (1981). Enzymatic cleavage of carbohydrate moieties on polypeptides can be achieved by the use of a variety of endo- and exo-glycosidases as described by Thotakura et al., Meth. Enzymol., 138:350 (1987).

[0647] Another type of covalent modification of PRO comprises linking the PRO polypeptide to one of a variety of nonproteinaceous polymers, e.g., polyethylene glycol (PEG), polypropylene glycol, or polyoxyalkylenes, in the manner set forth in U.S. Pat. No. 4,640,835; 4,496,689; 4,301,144; 4,670,417; 4,791,192 or 4,179,337.

[0648] The PRO of the present invention may also be modified in a way to form a chimeric molecule comprising PRO fused to another, heterologous polypeptide or amino acid sequence.

[0649] In one embodiment, such a chimeric molecule comprises a fusion of the PRO with a tag polypeptide which provides an epitope to which an anti-tag antibody can selectively bind. The epitope tag is generally placed at the amino- or carboxyl-terminus of the PRO. The presence of such epitope-tagged forms of the PRO can be detected using an antibody against the tag polypeptide. Also, provision of the epitope tag enables the PRO to be readily purified by affinity purification using an anti-tag antibody or another type of affinity matrix that binds to the epitope tag. Various tag polypeptides and their respective antibodies are well known in the art. Examples include poly-histidine (poly-his) or poly-histidine-glycine (poly-his-gly) tags; the flu HA tag polypeptide and its antibody 12CA5 [Field et al., Mol. Cell. Biol., 8:2159-2165 (1988)]; the c-myc tag and the 8F9, 3C7, 6E10, G4, B7 and 9E10 antibodies thereto [Evan et al., Molecular and Cellular Biology, 5:3610-3616 (1985)]; and the Herpes Simplex virus glycoprotein D (gD) tag and its antibody [Paborsky et al., Protein Engineering, 3(6):547-553 (1990)]. Other tag polypeptides include the Flag-peptide [Hopp et al., BioTechnology, 6:1204-1210 (1988)]; the KT3 epitope peptide [Martin et al., Science, 255:192-194 (1992)]; an alpha-tubulin epitope peptide [Skinner et al., J. Biol. Chem., 266:15163-15166 (1991)]; and the T7 gene 10 protein peptide tag [Lutz-Freyermuth et al., Proc. Natl. Acad. Sci. USA, 87:6393-6397 (1990)].

[0650] In an alternative embodiment, the chimeric molecule may comprise a fusion of the PRO with an immunoglobulin or a particular region of an immunoglobulin. For a bivalent form of the chimeric molecule (also referred to as an “immunoadhesin”), such a fusion could be to the Fc region of an IgG molecule. The Ig fusions preferably include the substitution of a soluble (transmembrane domain deleted or inactivated) form of a PRO polypeptide in place of at least one variable region within an Ig molecule. In a particularly preferred embodiment, the immunoglobulin fusion includes the hinge, CH2 and CH3, or the hinge, CH1, CH2 and CH3 regions of an IgG1 molecule. For the production of immunoglobulin fusions see also U.S. Pat. No. 5,428,130 issued Jun. 27, 1995.

[0651] D. Preparation of PRO

[0652] The description below relates primarily to production of PRO by culturing cells transformed or transfected with a vector containing PRO nucleic acid. It is, of course, contemplated that alternative methods, which are well known in the art, may be employed to prepare PRO. For instance, the PRO sequence, or portions thereof, may be produced by direct peptide synthesis using solid-phase techniques [see, e.g., Stewart et al., Solid-Phase Peptide Synthesis, W.H. Freeman Co., San Francisco, Calif. (1969); Merrifield, J. Am. Chem. Soc., 85:2149-2154 (1963)]. In vitro protein synthesis may be performed using manual techniques or by automation. Automated synthesis may be accomplished, for instance, using an Applied Biosystems Peptide Synthesizer (Foster City, Calif.) using manufacturer's instructions. Various portions of the PRO may be chemically synthesized separately and combined using chemical or enzymatic methods to produce the full-length PRO.

[0653] 1. Isolation of DNA Encoding PRO

[0654] DNA encoding PRO may be obtained from a cDNA library prepared from tissue believed to possess the PRO mRNA and to express it at a detectable level. Accordingly, human PRO DNA can be conveniently obtained from a cDNA library prepared from human tissue, such as described in the Examples. The PRO-encoding gene may also be obtained from a genomic library or by known synthetic procedures (e.g., automated nucleic acid synthesis).

[0655] Libraries can be screened with probes (such as antibodies to the PRO or oligonucleotides of at least about 20-80 bases) designed to identify the gene of interest or the protein encoded by it. Screening the cDNA or genomic library with the selected probe may be conducted using standard procedures, such as described in Sambrook et al., Molecular Cloning: A Laboratory Manual (New York: Cold Spring Harbor Laboratory Press, 1989). An alternative means to isolate the gene encoding PRO is to use PCR methodology [Sambrook et al., supra: Dieffenbach et al., PCR Primer: A Laboratory Manual (Cold Spring Harbor Laboratory Press, 1995)].

[0656] The Examples below describe techniques for screening a cDNA library. The oligonucleotide sequences selected as probes should be of sufficient length and sufficiently unambiguous that false positives are minimized. The oligonucleotide is preferably labeled such that it can be detected upon hybridization to DNA in the library being screened. Methods of labeling are well known in the art, and include the use of radiolabels like ³²P-labeled ATP, biotinylation or enzyme labeling. Hybridization conditions, including moderate stringency and high stringency, are provided in Sambrook et al., supra.

[0657] Sequences identified in such library screening methods can be compared and aligned to other known sequences deposited and available in public databases such as GenBank or other private sequence databases. Sequence identity (at either the amino acid or nucleotide level) within defined regions of the molecule or across the full-length sequence can be determined using methods known in the art and as described herein.

[0658] Nucleic acid having protein coding sequence may be obtained by screening selected cDNA or genomic libraries using the deduced amino acid sequence disclosed herein for the first time, and, if necessary, using conventional primer extension procedures as described in Sambrook et al., supra, to detect precursors and processing intermediates of mRNA that may not have been reverse-transcribed into cDNA.

[0659] 2. Selection and Transformation of Host Cells

[0660] Host cells are transfected or transformed with expression or cloning vectors described herein for PRO production and cultured in conventional nutrient media modified as appropriate for inducing promoters, selecting transformants, or amplifying the genes encoding the desired sequences. The culture conditions, such as media, temperature, pH and the like, can be selected by the skilled artisan without undue experimentation. In general, principles, protocols, and practical techniques for maximizing the productivity of cell cultures can be found in Mammalian Cell Biotechnology: a Practical Approach, M. Butler, ed. (IRL Press, 1991) and Sambrook et al., supra.

[0661] Methods of eukaryotic cell transfection and prokaryotic cell transformation are known to the ordinarily skilled artisan, for example, CaCl₂, CaPO₄, liposome-mediated and electroporation. Depending on the host cell used, transformation is performed using standard techniques appropriate to such cells. The calcium treatment employing calcium chloride, as described in Sambrook et al., supra, or electroporation is generally used for prokaryotes. Infection with Agrobacterium tumefaciens is used for transformation of certain plant cells, as described by Shaw et al., Gene, 23:315 (1983) and WO 89/05859 published 29 Jun. 1989. For mammalian cells without such cell walls, the calcium phosphate precipitation method of Graham and van der Eb, Virology, 52:456-457 (1978) can be employed. General aspects of mammalian cell host system transfections have been described in U.S. Pat. No. 4,399,216. Transformations into yeast are typically carried out according to the method of Van Solingen et al., J. Bact., 130:946 (1977) and Hsiao et al., Proc. Natl. Acad. Sci. (USA), 76:3829 (1979). However, other methods for introducing DNA into cells, such as by nuclear microinjection, electroporation, bacterial protoplast fusion with intact cells, or polycations, e.g., polybrene, polyornithine, may also be used. For various techniques for transforming mammalian cells, see Keown et al., Methods in Enzymology, 185:527-537 (1990) and Mansour et al., Nature, 336:348-352 (1988).

[0662] Suitable host cells for cloning or expressing the DNA in the vectors herein include prokaryote, yeast, or higher eukaryote cells. Suitable prokaryotes include but are not limited to eubacteria, such as Gram-negative or Gram-positive organisms, for example, Enterobacteriaceae such as E. coli. Various E. coli strains are publicly available, such as E. coli K12 strain MM294 (ATCC 31,446); E. coli X1776 (ATCC 31,537); E. coli strain W3110 (ATCC 27,325) and KS 772 (ATCC 53,635). Other suitable prokaryotic host cells include Enterobacteriaceae such as Escherichia, e.g., E. coli, Enterobacter, Erwinia, Klebsiella, Proteus, Salmonella, e.g., Salmonella typhimurium, Serratia, e.g., Serratia marcescans, and Shigella, as well as Bacilli such as B. subtilis and B. licheniformis (e.g., B. licheniformis 41P disclosed in DD 266,710 published 12 Apr. 1989), Pseudomonas such as P. aeruginosa, and Streptomyces. These examples are illustrative rather than limiting. Strain W3110 is one particularly preferred host or parent host because it is a common host strain for recombinant DNA product fermentations. Preferably, the host cell secretes minimal amounts of proteolytic enzymes. For example, strain W3110 may be modified to effect a genetic mutation in the genes encoding proteins endogenous to the host, with examples of such hosts including E. coli W3110 strain 1A2, which has the complete genotype tonA; E. coli W3110 strain 9E4, which has the complete genotype tonA ptr3; E. coli W3110 strain 27C7 (ATCC 55,244), which has the complete genotype tonA ptr3 phoA E15 (argF-lac)169 degP ompT kan^{r}; E. coli W3110 strain 37D6, which has the complete genotype tonA ptr3 phoA E15 (argF-lac)169 degP ompT rbs7 ilvG kan^{r}; E. coli W3110 strain 40B4, which is strain 37D6 with a non-kanamycin resistant degP deletion mutation; and an E. coli strain having mutant periplasmic protease disclosed in U.S. Pat. No. 4,946,783 issued 7 Aug. 1990. Alternatively, in vitro methods of cloning, e.g., PCR or other nucleic acid polymerase reactions, are suitable.

[0663] In addition to prokaryotes, eukaryotic microbes such as filamentous fungi or yeast are suitable cloning or expression hosts for PRO-encoding vectors. Saccharomyces cerevisiae is a commonly used lower eukaryotic host microorganism. Others include Schizosaccharomyces pombe (Beach and Nurse, Nature, 290: 140 [1981]; EP 139,383 published 2 May 1985); Kluyveromyces hosts (U.S. Pat. No. 4,943,529; Fleer et al., Bio/Technology, 9:968-975 (1991)) such as, e.g., K. lactis (MW98-8C, CBS683, CBS4574; Louvencourt et al., J. Bacteriol., 154(2):737-742 [1983]), K. fragilis (ATCC 12,424), K. bulgaricus (ATCC 16,045), K. wickeramii (ATCC 24,178), K. waltii (ATCC 56,500), K. drosophilarum (ATCC 36,906; Van den Berg et al., Bio/Technology, 8:135 (1990)), K. thermotolerans, and K. marxianus; yarrowia (EP 402,226); Pichia pastoris (EP 183,070; Sreekrishna et al., J. Basic Microbiol., 28:265-278 [1988]); Candida; Trichoderma reesia (EP 244,234); Neurospora crassa (Case et al., Proc. Natl. Acad. Sci. USA, 76:5259-5263 [1979]); Schwanniomyces such as Schwanniomyces occidentalis (EP 394,538 published 31 Oct. 1990); and filamentous fungi such as, e.g., Neurospora, Penicillium, Tolypocladium (WO 91/00357 published 10 Jan. 1991), and Aspergillus hosts such as A. nidulans (Ballance et al., Biochem. Biophys. Res. Commun., 112:284-289 [1983]; Tilburn et al., Gene, 26:205-221 [1983]; Yelton et al., Proc. Natl. Acad. Sci. USA. 81: 1470-1474 [1984]) and A. niger (Kelly and Hynes, EMBO J., 4:475-479 [1985]). Methylotropic yeasts are suitable herein and include, but are not limited to, yeast capable of growth on methanol selected from the genera consisting of Hansenula, Candida, Kloeckera, Pichia, Saccharomyces, Torulopsis, and Rhodotorula. A list of specific species that are exemplary of this class of yeasts may be found in C. Anthony, The Biochemistry of Methylotrophs, 269 (1982).

[0664] Suitable host cells for the expression of glycosylated PRO are derived from multicellular organisms. Examples of invertebrate cells include insect cells such as Drosophila S2 and Spodoptera Sf9, as well as plant cells. Examples of useful mammalian host cell lines include Chinese hamster ovary (CHO) and COS cells. More specific examples include monkey kidney CV1 line transformed by SV40 (COS-7, ATCC CRL 1651); human embryonic kidney line (293 or 293 cells subcloned for growth in suspension culture, Graham et al., J. Gen Virol., 36:59 (1977)); Chinese hamster ovary cells/-DHFR (CHO, Urlaub and Chasin, Proc. Natl. Acad. Sci. USA, 77:4216 (1980)); mouse sertoli cells (TM4, Mather, Biol. Reprod., 23:243-251 (1980)); human lung cells (W138, ATCC CCL 75); human liver cells (Hep G2, HB 8065); and mouse mammary tumor (MMT 060562, ATCC CCL51). The selection of the appropriate host cell is deemed to be within the skill in the art.

3. Selection and Use of a Replicable Vector

[0665] The nucleic acid (e.g., cDNA or genomic DNA) encoding PRO may be inserted into a replicable vector for cloning (amplification of the DNA) or for expression. Various vectors are publicly available. The vector may, for example, be in the form of a plasmid, cosmid, viral particle, or phage. The appropriate nucleic acid sequence may be inserted into the vector by a variety of procedures. In general, DNA is inserted into an appropriate restriction endonuclease site(s) using techniques known in the art. Vector components generally include, but are not limited to, one or more of a signal sequence, an origin of replication, one or more marker genes, an enhancer element, a promoter, and a transcription termination sequence. Construction of suitable vectors containing one or more of these components employs standard ligation techniques which are known to the skilled artisan.

[0666] The PRO may be produced recombinantly not only directly, but also as a fusion polypeptide with a heterologous polypeptide, which may be a signal sequence or other polypeptide having a specific cleavage site at the N-terminus of the mature protein or polypeptide. In general, the signal sequence may be a component of the vector, or it may be a part of the PRO-encoding DNA that is inserted into the vector. The signal sequence may be a prokaryotic signal sequence selected, for example, from the group of the alkaline phosphatase, penicillinase, lpp, or heat-stable enterotoxin II leaders. For yeast secretion the signal sequence may be, e.g., the yeast invertase leader, alpha factor leader (including Saccharomyces and Kluyveromyces α-factor leaders, the latter described in U.S. Pat. No. 5,010,182), or acid phosphatase leader, the C. albicans glucoamylase leader (EP 362,179 published 4 Apr. 1990), or the signal described in WO 90/13646 published 15 Nov. 1990. In mammalian cell expression, mammalian signal sequences may be used to direct secretion of the protein, such as signal sequences from secreted polypeptides of the same or related species, as well as viral secretory leaders.

[0667] Both expression and cloning vectors contain a nucleic acid sequence that enables the vector to replicate in one or more selected host cells. Such sequences are well known for a variety of bacteria, yeast, and viruses. The origin of replication from the plasmid pBR322 is suitable for most Gram-negative bacteria, the 2μ plasmid origin is suitable for yeast, and various viral origins (SV40, polyoma, adenovirus, VSV or BPV) are useful for cloning vectors in mammalian cells.

[0668] Expression and cloning vectors will typically contain a selection gene, also termed a selectable marker. Typical selection genes encode proteins that (a) confer resistance to antibiotics or other toxins, e.g., ampicillin, neomycin, methotrexate, or tetracycline, (b) complement auxotrophic deficiencies, or (c) supply critical nutrients not available from complex media, e.g., the gene encoding D-alanine racemase for Bacilli.

[0669] An example of suitable selectable markers for mammalian cells are those that enable the identification of cells competent to take up the PRO-encoding nucleic acid, such as DHFR or thymidine kinase. An appropriate host cell when wild-type DHFR is employed is the CHO cell line deficient in DHFR activity, prepared and propagated as described by Urlaub et al., Proc. Natl. Acad. Sci. USA, 77:4216 (1980). A suitable selection gene for use in yeast is the trp1 gene present in the yeast plasmid YRp7 [Stinchcomb et al., Nature, 282:39 (1979); Kingsman et al., Gene, 7:141 (1979); Tschemper et al., Gene, 10:157 (1980)]. The trp1 gene provides a selection marker for a mutant strain of yeast lacking the ability to grow in tryptophan, for example, ATCC No. 44076 or PEP4-1 [Jones, Genetics, 85:12 (1977)].

[0670] Expression and cloning vectors usually contain a promoter operably linked to the PRO-encoding nucleic acid sequence to direct mRNA synthesis. Promoters recognized by a variety of potential host cells are well known. Promoters suitable for use with prokaryotic hosts include the β-lactamase and lactose promoter systems [Chang et al., Nature, 275:615 (1978); Goeddel et al., Nature, 281:544 (1979)], alkaline phosphatase, a tryptophan (trp) promoter system [Goeddel, Nucleic Acids Res., 8:4057 (1980); EP 36,776], and hybrid promoters such as the tac promoter [deBoer et al., Proc. Natl. Acad. Sci. USA, 80:21-25 (1983)]. Promoters for use in bacterial systems also will contain a Shine-Dalgarno (S.D.) sequence operably linked to the DNA encoding PRO.

[0671] Examples of suitable promoting sequences for use with yeast hosts include the promoters for 3-phosphoglycerate kinase [Hitzeman et al., J. Biol. Chem., 255:2073 (1980)] or other glycolytic enzymes [Hess et al., J. Adv. Enzyme Reg., 7:149 (1968); Holland, Biochemistry, 17:4900 (1978)], such as enolase, glyceraldehyde-3-phosphate dehydrogenase, hexokinase, pyruvate decarboxylase, phosphofructokinase, glucose-6-phosphate isomerase, 3-phosphoglycerate mutase, pyruvate kinase, triosephosphate isomerase, phosphoglucose isomerase, and glucokinase.

[0672] Other yeast promoters, which are inducible promoters having the additional advantage of transcription controlled by growth conditions, are the promoter regions for alcohol dehydrogenase 2, isocytochrome C, acid phosphatase, degradative enzymes associated with nitrogen metabolism, metallothionein, glyceraldehyde-3-phosphate dehydrogenase, and enzymes responsible for maltose and galactose utilization. Suitable vectors and promoters for use in yeast expression are further described in EP 73,657.

[0673] PRO transcription from vectors in mammalian host cells is controlled, for example, by promoters obtained from the genomes of viruses such as polyoma virus, fowlpox virus (UK 2,211,504 published 5 Jul. 1989), adenovirus (such as Adenovirus 2), bovine papilloma virus, avian sarcoma virus, cytomegalovirus, a retrovirus, hepatitis-B virus and Simian Virus 40 (SV40), from heterologous mammalian promoters, e.g., the actin promoter or an immunoglobulin promoter, and from heat-shock promoters, provided such promoters are compatible with the host cell systems.

[0674] Transcription of a DNA encoding the PRO by higher eukaryotes may be increased by inserting an enhancer sequence into the vector. Enhancers are cis-acting elements of DNA, usually about from 10 to 300 bp, that act on a promoter to increase its transcription. Many enhancer sequences are now known from mammalian genes (globin, elastase, albumin, α-fetoprotein, and insulin). Typically, however, one will use an enhancer from a eukaryotic cell virus. Examples include the SV40 enhancer on the late side of the replication origin (bp 100-270), the cytomegalovirus early promoter enhancer, the polyoma enhancer on the late side of the replication origin, and adenovirus enhancers. The enhancer may be spliced into the vector at a position 5′ or 3′ to the PRO coding sequence, but is preferably located at a site 5′ from the promoter.

[0675] Expression vectors used in eukaryotic host cells (yeast, fungi, insect, plant, animal, human, or nucleated cells from other multicellular organisms) will also contain sequences necessary for the termination of transcription and for stabilizing the mRNA. Such sequences are commonly available from the 5′ and, occasionally 3′, untranslated regions of eukaryotic or viral DNAs or cDNAs. These regions contain nucleotide segments transcribed as polyadenylated fragments in the untranslated portion of the mRNA encoding PRO.

[0676] Still other methods, vectors, and host cells suitable for adaptation to the synthesis of PRO in recombinant vertebrate cell culture are described in Gething et al., Nature, 293:620-625 (1981); Mantei et al., Nature, 281:4046 (1979); EP 117,060; and EP 117,058.

[0677] 4. Detecting Gene Amplification/Expression

[0678] Gene amplification and/or expression may be measured in a sample directly, for example, by conventional Southern blotting, Northern blotting to quantitate the transcription of mRNA [Thomas, Proc. Natl. Acad. Sci. USA, 77:5201-5205 (1980)], dot blotting (DNA analysis), or in situ hybridization, using an appropriately labeled probe, based on the sequences provided herein. Alternatively, antibodies may be employed that can recognize specific duplexes, including DNA duplexes, RNA duplexes, and DNA-RNA hybrid duplexes or DNA-protein duplexes. The antibodies in turn may be labeled and the assay may be carried out where the duplex is bound to a surface, so that upon the formation of duplex on the surface, the presence of antibody bound to the duplex can be detected.

[0679] Gene expression, alternatively, may be measured by immunological methods, such as immunohistochemical staining of cells or tissue sections and assay of cell culture or body fluids, to quantitate directly the expression of gene product. Antibodies useful for immunohistochemical staining and/or assay of sample fluids may be either monoclonal or polyclonal, and may be prepared in any mammal. Conveniently, the antibodies may be prepared against a native sequence PRO polypeptide or against a synthetic peptide based on the DNA sequences provided herein or against exogenous sequence fused to PRO DNA and encoding a specific antibody epitope.

[0680] 5. Purification of Polypeptide

[0681] Forms of PRO may be recovered from culture medium or from host cell lysates. If membrane-bound, it can be released from the membrane using a suitable detergent solution (e.g. Triton-X 100) or by enzymatic cleavage. Cells employed in expression of PRO can be disrupted by various physical or chemical means, such as freeze-thaw cycling, sonication, mechanical disruption, or cell lysing agents.

[0682] It may be desired to purify PRO from recombinant cell proteins or polypeptides. The following procedures are exemplary of suitable purification procedures: by fractionation on an ion-exchange column; ethanol precipitation; reverse phase HPLC; chromatography on silica or on a cation-exchange resin such as DEAE; chromatofocusing; SDS-PAGE; ammonium sulfate precipitation; gel filtration using, for example, Sephadex G-75; protein A Sepharose columns to remove contaminants such as IgG; and metal chelating columns to bind epitope-tagged forms of the PRO. Various methods of protein purification may be employed and such methods are known in the art and described for example in Deutscher, Methods in Enzymology, 182 (1990); Scopes, Protein Purification: Principles and Practice Springer-Verlag, New York (1982). The purification step(s) selected will depend, for example, on the nature of the production process used and the particular PRO produced.

[0683] E. Tissue Distribution

[0684] The location of tissues expressing the PRO can be identified by determining mRNA expression in various human tissues. The location of such genes provides information about which tissues are most likely to be affected by the stimulating and inhibiting activities of the PRO polypeptides. The location of a gene in a specific tissue also provides sample tissue for the activity blocking assays discussed below.

[0685] As noted before, gene expression in various tissues may be measured by conventional Southern blotting, Northern blotting to quantitate the transcription of mRNA (Thomas, Proc. Natl. Acad. Sci. USA, 77:5201-5205 [1980]), dot blotting (DNA analysis), or in situ hybridization, using an appropriately labeled probe, based on the sequences provided herein. Alternatively, antibodies may be employed that can recognize specific duplexes, including DNA duplexes, RNA duplexes, and DNA-RNA hybrid duplexes or DNA-protein duplexes.

[0686] Gene expression in various tissues, alternatively, may be measured by immunological methods, such as immunohistochemical staining of tissue sections and assay of cell culture or body fluids, to quantitate directly the expression of gene product. Antibodies useful for immunohistochemical staining and/or assay of sample fluids may be either monoclonal or polyclonal, and may be prepared in any mammal. Conveniently, the antibodies may be prepared against a native sequence of a PRO polypeptide or against a synthetic peptide based on the DNA sequences encoding the PRO polypeptide or against an exogenous sequence fused to a DNA encoding a PRO polypeptide and encoding a specific antibody epitope. General techniques for generating antibodies, and special protocols for Northern blotting and in situ hybridization are provided below.

[0687] F. Antibody Binding Studies

[0688] The activity of the PRO polypeptides can be further verified by antibody binding studies, in which the ability of anti-PRO antibodies to inhibit the effect of the PRO polypeptides, respectively, on tissue cells is tested. Exemplary antibodies include polyclonal, monoclonal, humanized, bispecific, and heteroconjugate antibodies, the preparation of which will be described hereinbelow.

[0689] Antibody binding studies may be carried out in any known assay method, such as competitive binding assays, direct and indirect sandwich assays, and immunoprecipitation assays. Zola, Monoclonal Antibodies: A Manual of Techniques, pp. 147-158 (CRC Press, Inc., 1987).

[0690] Competitive binding assays rely on the ability of a labeled standard to compete with the test sample analyte for binding with a limited amount of antibody. The amount of target protein in the test sample is inversely proportional to the amount of standard that becomes bound to the antibodies. To facilitate determining the amount of standard that becomes bound, the antibodies preferably are insolubilized before or after the competition, so that the standard and analyte that are bound to the antibodies may conveniently be separated from the standard and analyte which remain unbound.

[0691] Sandwich assays involve the use of two antibodies, each capable of binding to a different immunogenic portion, or epitope, of the protein to be detected. In a sandwich assay, the test sample analyte is bound by a first antibody which is immobilized on a solid support, and thereafter a second antibody binds to the analyte, thus forming an insoluble three-part complex. See, e.g., U.S. Pat. No. 4,376,110. The second antibody may itself be labeled with a detectable moiety (direct sandwich assays) or may be measured using an anti-immunoglobulin antibody that is labeled with a detectable moiety (indirect sandwich assay). For example, one type of sandwich assay is an ELISA assay, in which case the detectable moiety is an enzyme.

[0692] For immunohistochemistry, the tissue sample may be fresh or frozen or may be embedded in paraffin and fixed with a preservative such as formalin, for example.

[0693] G. Cell-Based Assays

[0694] Cell-based assays and animal models for immune related diseases can be used to further understand the relationship between the genes and polypeptides identified herein and the development and pathogenesis of immune related disease.

[0695] In a different approach, cells of a cell type known to be involved in a particular immune related disease are transfected with the cDNAs described herein, and the ability of these cDNAs to stimulate or inhibit immune function is analyzed. Suitable cells can be transfected with the desired gene, and monitored for immune function activity. Such transfected cell lines can then be used to test the ability of poly- or monoclonal antibodies or antibody compositions to inhibit or stimulate immune function, for example to modulate B-cell proliferation or Ig production. Cells transfected with the coding sequences of the genes identified herein can further be used to identify drug candidates for the treatment of immune related diseases.

[0696] In addition, primary cultures derived from transgenic animals (as described below) can be used in the cell-based assays herein, although stable cell lines are preferred. Techniques to derive continuous cell lines from transgenic animals are well known in the art (see, e.g., Small et al., Mol. Cell. Biol. 5: 642-648 [1985]).

[0697] A cell based assay for B cells involves incubation of B cells with test polypeptides thought to be inhibitory of IgE production. The amount of inhibition by test polypeptides is compared with IgE production of B cells inhibited by E25 antibody. Human primary PBMCs (1×10e6 cell/mL-1 mL final) are isolated and incubated at 37° C. On Day 1, PMBCs (500 ul-2×10e6/mL) in assay medium containing IL-4 [20 ng/mL] and anti-CD40 [100 ng/mL] are combined with 500 ul test polypeptide (2× desired final concentration) into wells. Currently assay is 24 well with a 1 mL volume. Media is PSO₄ with 15% horse serum (Intergen, Atlanta Ga.), 100 units/mL penicillin with 100 mg/mL streptomycin (Gibco, Gaithersburg Md.), and 200 mM glutamine. On Day 14 cells are centrifuged and supernatant removed for quantitation of IgE. The quantity of IgE is determined by ELISA. A test polypeptide is considered positive if IgE synthesis is decreased by greater than 50% and/or 50% of maximum inhibition by E25. The test polypeptides are run in singlet and the IgE ELISA is run in duplicate for each well.

[0698] On the other hand, PRO polypeptides, as well as other compounds of the invention, which are direct inhibitors of B cell proliferation/activation and/or Ig secretion can be directly used to suppress the immune response. These compounds are useful to reduce the degree of the immune response and to treat immune related diseases characterized by a hyperactive, superoptimal, or autoimmune response. The use of compound which suppress Ig production would be expected to reduce inflammation. Such uses would be beneficial in treating conditions associated with excessive inflammation.

[0699] Alternatively, compounds, e.g., antibodies, which bind to stimulating PRO polypeptides and block the stimulating effect of these molecules produce a net inhibitory effect and can be used to suppress the B cell mediated immune response by inhibiting B cell proliferation/activation, lymphokine secretion and/or Ig secretion. Blocking the stimulating effect of the polypeptides suppresses the immune response of the mammal.

[0700] H. Animal Models

[0701] The results of cell based in vitro assays can be further verified using in vivo animal models and assays for B-cell function. A variety of well known animal models can be used to further understand the role of the genes identified herein in the development and pathogenesis of immune related disease, and to test the efficacy of candidate therapeutic agents, including antibodies, and other antagonists of the native polypeptides, including small molecule antagonists. The in vivo nature of such models makes them predictive of responses in human patients. Animal models of immune related diseases include both non-recombinant and recombinant (transgenic) animals. Non-recombinant animal models include, for example, rodent, e.g., murine models. Such models can be generated by introducing cells into syngeneic mice using standard techniques, e.g., subcutaneous injection, tail vein injection, spleen implantation, intraperitoneal implantation, implantation under the renal capsule, etc.

[0702] An animal model of Systemic Lupus Erythematosus (SLE) was developed specifically for studying this disease. The NZB mouse was the first strain to be described and is the one most like SLE. Female NZB mice develop kidney lesions and hemolytic anemia and produce anti-DNA antibodies, much like SLE in humans. The B cells of these mice are extremely responsive to antigens and cytokines and this abnormal sensitivity has been proposed for the immunologic aberancy in these mice.

[0703] Recombinant (transgenic) animal models can be engineered by introducing the coding portion of the genes identified herein into the genome of animals of interest, using standard techniques for producing transgenic animals. Animals that can serve as a target for transgenic manipulation include, without limitation, mice, rats, rabbits, guinea pigs, sheep, goats, pigs, and non-human primates, e.g., baboons, chimpanzees and monkeys. Techniques known in the art to introduce a transgene into such animals include pronucleic microinjection (Hoppe and Wanger, U.S. Pat. No. 4,873,191); retrovirus-mediated gene transfer into germ lines (e.g., Van der Putten et al., Proc. Natl. Acad. Sci. USA 82, 6148-615 [1985]); gene targeting in embryonic stem cells (Thompson et al., Cell 56, 313-321 [1989]); electroporation of embryos (Lo, Mol. Cel. Biol. 3, 1803-1814 [1983]); sperm-mediated gene transfer (Lavitrano et al., Cell 57, 717-73 [1989]). For review, see, for example, U.S. Pat. No. 4,736,866.

[0704] For the purpose of the present invention, transgenic animals include those that carry the transgene only in part of their cells (“mosaic animals”). The transgene can be integrated either as a single transgene, or in concatamers, e.g., head-to-head or head-to-tail tandems. Selective introduction of a transgene into a particular cell type is also possible by following, for example, the technique of Lasko et al., Proc. Natl. Acad. Sci. USA 89, 6232-636 (1992).

[0705] The expression of the transgene in transgenic animals can be monitored by standard techniques. For example, Southern blot analysis or PCR amplification can be used to verify the integration of the transgene. The level of mRNA expression can then be analyzed using techniques such as in situ hybridization, Northern blot analysis, PCR, or immunocytochemistry.

[0706] The animals may be further examined for signs of immune disease pathology, for example by histological examination to determine infiltration of immune cells into specific tissues. Blocking experiments can also be performed in which the transgenic animals are treated with the compounds of the invention to determine the extent of the B cell proliferation, stimulation or inhibition of the compounds. In these experiments, blocking antibodies which bind to the PRO polypeptide, prepared as described above, are administered to the animal and the effect on immune function is determined.

[0707] Alternatively, “knock out” animals can be constructed which have a defective or altered gene encoding a polypeptide identified herein, as a result of homologous recombination between the endogenous gene encoding the polypeptide and altered genomic DNA encoding the same polypeptide introduced into an embryonic cell of the animal. For example, cDNA encoding a particular polypeptide can be used to clone genomic DNA encoding that polypeptide in accordance with established techniques. A portion of the genomic DNA encoding a particular polypeptide can be deleted or replaced with another gene, such as a gene encoding a selectable marker which can be used to monitor integration. Typically, several kilobases of unaltered flanking DNA (both at the 5′ and 3′ ends) are included in the vector [see e.g., Thomas and Capecchi, Cell, 51:503 (1987) for a description of homologous recombination vectors]. The vector is introduced into an embryonic stem cell line (e.g., by electroporation) and cells in which the introduced DNA has homologously recombined with the endogenous DNA are selected [see e.g., Li et al., Cell, 69:915 (1992)]. The selected cells are then injected into a blastocyst of an animal (e.g., a mouse or rat) to form aggregation chimeras [see e.g., Bradley, in Teratocarcinomas and Embryonic Stem Cells: A Practical Approach, E. J. Robertson, ed. (IRL, Oxford, 1987), pp. 113-152]. A chimeric embryo can then be implanted into a suitable pseudopregnant female foster animal and the embryo brought to term to create a “knock out” animal. Progeny harboring the homologously recombined DNA in their germ cells can be identified by standard techniques and used to breed animals in which all cells of the animal contain the homologously recombined DNA. Knockout animals can be characterized for instance, for their ability to defend against certain pathological conditions and for their development of pathological conditions due to absence of the polypeptide.

[0708] I. Screening Assays for Drug Candidates

[0709] Screening assays for drug candidates are designed to identify compounds that bind to or complex with the polypeptides encoded by the genes identified herein or a biologically active fragment thereof, or otherwise interfere with the interaction of the encoded polypeptides with other cellular proteins. Such screening assays will include assays amenable to high-throughput screening of chemical libraries, making them particularly suitable for identifying small molecule drug candidates. Small molecules contemplated include synthetic organic or inorganic compounds, including peptides, preferably soluble peptides, (poly)peptide-immunoglobulin fusions, and, in particular, antibodies including, without limitation, poly- and monoclonal antibodies and antibody fragments, single-chain antibodies, anti-idiotypic antibodies, and chimeric or humanized versions of such antibodies or fragments, as well as human antibodies and antibody fragments. The assays can be performed in a variety of formats, including protein-protein binding assays, biochemical screening assays, immunoassays and cell based assays, which are well characterized in the art. All assays are common in that they call for contacting the drug candidate with a polypeptide encoded by a nucleic acid identified herein under conditions and for a time sufficient to allow these two components to interact.

[0710] In binding assays, the interaction is binding and the complex formed can be isolated or detected in the reaction mixture. In a particular embodiment, the polypeptide encoded by the gene identified herein or the drug candidate is immobilized on a solid phase, e.g., on a microtiter plate, by covalent or non-covalent attachments. Non-covalent attachment generally is accomplished by coating the solid surface with a solution of the polypeptide and drying. Alternatively, an immobilized antibody, e.g., a monoclonal antibody, specific for the polypeptide to be immobilized can be used to anchor it to a solid surface. The assay is performed by adding the non-immobilized component, which may be labeled by a detectable label, to the immobilized component, e.g., the coated surface containing the anchored component. When the reaction is complete, the non-reacted components are removed, e.g., by washing, and complexes anchored on the solid surface are detected. When the originally non-immobilized component carries a detectable label, the detection of label immobilized on the surface indicates that complexing occurred. Where the originally non-immobilized component does not carry a label, complexing can be detected, for example, by using a labelled antibody specifically binding the immobilized complex.

[0711] If the candidate compound interacts with but does not bind to a particular protein encoded by a gene identified herein, its interaction with that protein can be assayed by methods well known for detecting protein-protein interactions. Such assays include traditional approaches, such as, cross-linking, co-immunoprecipitation, and co-purification through gradients or chromatographic columns. In addition, protein-protein interactions can be monitored by using a yeast-based genetic system described by Fields and co-workers [Fields and Song, Nature (London) 340, 245-246 (1989); Chien et al., Proc. Natl. Acad. Sci. USA 88, 9578-9582 (1991)] as disclosed by Chevray and Nathans, Proc. Natl. Acad. Sci. USA 89, 5789-5793 (1991). Many transcriptional activators, such as yeast GAL4, consist of two physically discrete modular domains, one acting as the DNA-binding domain, while the other one functioning as the transcription activation domain. The yeast expression system described in the foregoing publications (generally referred to as the “two-hybrid system”) takes advantage of this property, and employs two hybrid proteins, one in which the target protein is fused to the DNA-binding domain of GAL4, and another, in which candidate activating proteins are fused to the activation domain. The expression of a GAL1-lacZ reporter gene under control of a GAL4-activated promoter depends on reconstitution of GAL4 activity via protein-protein interaction. Colonies containing interacting polypeptides are detected with a chromogenic substrate for β-galactosidase. A complete kit (MATCHMAKER™) for identifying protein-protein interactions between two specific proteins using the two-hybrid technique is commercially available from Clontech. This system can also be extended to map protein domains involved in specific protein interactions as well as to pinpoint amino acid residues that are crucial for these interactions.

[0712] In order to find compounds that interfere with the interaction of a gene identified herein and other intra- or extracellular components can be tested, a reaction mixture is usually prepared containing the product of the gene and the intra- or extracellular component under conditions and for a time allowing for the interaction and binding of the two products. To test the ability of a test compound to inhibit binding, the reaction is run in the absence and in the presence of the test compound. In addition, a placebo may be added to a third reaction mixture, to serve as positive control. The binding (complex formation) between the test compound and the intra- or extracellular component present in the mixture is monitored as described above. The formation of a complex in the control reaction(s) but not in the reaction mixture containing the test compound indicates that the test compound interferes with the interaction of the test compound and its reaction partner.

[0713] J. Compositions and Methods for the Treatment of Immune Related Diseases

[0714] The compositions useful in the treatment of immune related diseases include, without limitation, proteins, antibodies, small organic molecules, peptides, phosphopeptides, antisense and ribozyme molecules, triple helix molecules, etc. that inhibit or stimulate immune function, for example, B cell proliferation/activation, lymphokine release, or Ig production.

[0715] For example, antisense RNA and RNA molecules act to directly block the translation of mRNA by hybridizing to targeted mRNA and preventing protein translation. When antisense DNA is used, oligodeoxyribonucleotides derived from the translation initiation site, e.g., between about −10 and +10 positions of the target gene nucleotide sequence, are preferred.

[0716] Ribozymes are enzymatic RNA molecules capable of catalyzing the specific cleavage of RNA. Ribozymes act by sequence-specific hybridization to the complementary target RNA, followed by endonucleolytic cleavage. Specific ribozyme cleavage sites within a potential RNA target can be identified by known techniques. For further details see, e.g., Rossi, Current Biology 4, 469-471 (1994), and PCT publication No. WO 97/33551 (published Sep. 18, 1997).

[0717] Nucleic acid molecules in triple helix formation used to inhibit transcription should be single-stranded and composed of deoxynucleotides. The base composition of these oligonucleotides is designed such that it promotes triple helix formation via Hoogsteen base pairing rules, which generally require sizeable stretches of purines or pyrimidines on one strand of a duplex. For further details see, e.g., PCT publication No. WO 97/33551, supra.

[0718] These molecules can be identified by any or any combination of the screening assays discussed above and/or by any other screening techniques well known for those skilled in the art.

[0719] K. Anti-PRO Antibodies

[0720] The present invention further provides anti-PRO antibodies. Exemplary antibodies include polyclonal, monoclonal, humanized, bispecific, and heteroconjugate antibodies.

[0721] 1. Polyclonal Antibodies

[0722] The anti-PRO antibodies may comprise polyclonal antibodies. Methods of preparing polyclonal antibodies are known to the skilled artisan. Polyclonal antibodies can be raised in a mammal, for example, by one or more injections of an immunizing agent and, if desired, an adjuvant. Typically, the immunizing agent and/or adjuvant will be injected in the mammal by multiple subcutaneous or intraperitoneal injections. The immunizing agent may include the PRO polypeptide or a fusion protein thereof. It may be useful to conjugate the immunizing agent to a protein known to be immunogenic in the mammal being immunized. Examples of such immunogenic proteins include but are not limited to keyhole limpet hemocyanin, serum albumin, bovine thyroglobulin, and soybean trypsin inhibitor. Examples of adjuvants which may be employed include Freund's complete adjuvant and MPL-TDM adjuvant (monophosphoryl Lipid A, synthetic trehalose dicorynomycolate). The immunization protocol may be selected by one skilled in the art without undue experimentation.

2. Monoclonal Antibodies

[0723] The anti-PRO antibodies may, alternatively, be monoclonal antibodies. Monoclonal antibodies may be prepared using hybridoma methods, such as those described by Kohler and Milstein, Nature, 256:495 (1975). In a hybridoma method, a mouse, hamster, or other appropriate host animal, is typically immunized with an immunizing agent to elicit lymphocytes that produce or are capable of producing antibodies that will specifically bind to the immunizing agent. Alternatively, the lymphocytes may be immunized in vitro.

[0724] The immunizing agent will typically include the PRO polypeptide or a fusion protein thereof. Generally, either peripheral blood lymphocytes (“PBLs”) are used if cells of human origin are desired, or spleen cells or lymph node cells are used if non-human mammalian sources are desired. The lymphocytes are then fused with an immortalized cell line using a suitable fusing agent, such as polyethylene glycol, to form a hybridoma cell [Goding, Monoclonal Antibodies: Principles and Practice, Academic Press, (1986) pp. 59-103]. Immortalized cell lines are usually transformed mammalian cells, particularly myeloma cells of rodent, bovine and human origin. Usually, rat or mouse myeloma cell lines are employed. The hybridoma cells may be cultured in a suitable culture medium that preferably contains one or more substances that inhibit the growth or survival of the unfused, immortalized cells. For example, if the parental cells lack the enzyme hypoxanthine guanine phosphoribosyl transferase (HGPRT or HPRT), the culture medium for the hybridomas typically will include hypoxanthine, aminopterin, and thymidine (“HAT medium”), which substances prevent the growth of HGPRT-deficient cells.

[0725] Preferred immortalized cell lines are those that fuse efficiently, support stable high level expression of antibody by the selected antibody-producing cells, and are sensitive to a medium such as HAT medium. More preferred immortalized cell lines are murine myeloma lines, which can be obtained, for instance, from the Salk Institute Cell Distribution Center, San Diego, Calif. and the American Type Culture Collection, Manassas, Va. Human myeloma and mouse-human heteromyeloma cell lines also have been described for the production of human monoclonal antibodies [Kozbor, J. Immunol., 133:3001 (1984); Brodeur et al., Monoclonal Antibody Production Techniques and Applications, Marcel Dekker, Inc., New York, (1987) pp. 51-63].

[0726] The culture medium in which the hybridoma cells are cultured can then be assayed for the presence of monoclonal antibodies directed against PRO. Preferably, the binding specificity of monoclonal antibodies produced by the hybridoma cells is determined by immunoprecipitation or by an in vitro binding assay, such as radioimmunoassay (RIA) or enzyme-linked immunoabsorbent assay (ELISA). Such techniques and assays are known in the art. The binding affinity of the monoclonal antibody can, for example, be determined by the Scatchard analysis of Munson and Pollard, Anal. Biochem., 107:220 (1980).

[0727] After the desired hybridoma cells are identified, the clones may be subcloned by limiting dilution procedures and grown by standard methods [Goding, supra]. Suitable culture media for this purpose include, for example, Dulbecco's Modified Eagle's Medium and RPMI-1640 medium. Alternatively, the hybridoma cells may be grown in vivo as ascites in a mammal.

[0728] The monoclonal antibodies secreted by the subclones may be isolated or purified from the culture medium or ascites fluid by conventional immunoglobulin purification procedures such as, for example, protein A-Sepharose, hydroxylapatite chromatography, gel electrophoresis, dialysis, or affinity chromatography.

[0729] The monoclonal antibodies may also be made by recombinant DNA methods, such as those described in U.S. Pat. No. 4,816,567. DNA encoding the monoclonal antibodies of the invention can be readily isolated and sequenced using conventional procedures (e.g., by using oligonucleotide probes that are capable of binding specifically to genes encoding the heavy and light chains of murine antibodies). The hybridoma cells of the invention serve as a preferred source of such DNA. Once isolated, the DNA may be placed into expression vectors, which are then transfected into host cells such as simian COS cells, Chinese hamster ovary (CHO) cells, or myeloma cells that do not otherwise produce immunoglobulin protein, to obtain the synthesis of monoclonal antibodies in the recombinant host cells. The DNA also may be modified, for example, by substituting the coding sequence for human heavy and light chain constant domains in place of the homologous murine sequences [U.S. Pat. No. 4,816,567; Morrison et al., supra] or by covalently joining to the immunoglobulin coding sequence all or part of the coding sequence for a non-immunoglobulin polypeptide. Such a non-immunoglobulin polypeptide can be substituted for the constant domains of an antibody of the invention, or can be substituted for the variable domains of one antigen-combining site of an antibody of the invention to create a chimeric bivalent antibody.

[0730] The antibodies may be monovalent antibodies. Methods for preparing monovalent antibodies are well known in the art. For example, one method involves recombinant expression of immunoglobulin light chain and modified heavy chain. The heavy chain is truncated generally at any point in the Fc region so as to prevent heavy chain crosslinking. Alternatively, the relevant cysteine residues are substituted with another amino acid residue or are deleted so as to prevent crosslinking.

[0731] In vitro methods are also suitable for preparing monovalent antibodies. Digestion of antibodies to produce fragments thereof, particularly, Fab fragments, can be accomplished using routine techniques known in the art.

[0732] 3. Human and Humanized Antibodies

[0733] The anti-PRO antibodies of the invention may further comprise humanized antibodies or human antibodies. Humanized forms of non-human (e.g., murine) antibodies are chimeric immunoglobulins, immunoglobulin chains or fragments thereof (such as Fv, Fab, Fab′, F(ab′)₂ or other antigen-binding subsequences of antibodies) which contain minimal sequence derived from non-human immunoglobulin. Humanized antibodies include human immunoglobulins (recipient antibody) in which residues from a complementary determining region (CDR) of the recipient are replaced by residues from a CDR of a non-human species (donor antibody) such as mouse, rat or rabbit having the desired specificity, affinity and capacity. In some instances, Fv framework residues of the human immunoglobulin are replaced by corresponding non-human residues. Humanized antibodies may also comprise residues which are found neither in the recipient antibody nor in the imported CDR or framework sequences. In general, the humanized antibody will comprise substantially all of at least one, and typically two, variable domains, in which all or substantially all of the CDR regions correspond to those of a non-human immunoglobulin and all or substantially all of the FR regions are those of a human immunoglobulin consensus sequence. The humanized antibody optimally also will comprise at least a portion of an immunoglobulin constant region (Fc), typically that of a human immunoglobulin [Jones et al., Nature, 321:522-525 (1986); Riechmann et al., Nature, 332:323-329 (1988); and Presta, Curr. Op. Struct. Biol., 2:593-596 (1992)].

[0734] Methods for humanizing non-human antibodies are well known in the art. Generally, a humanized antibody has one or more amino acid residues introduced into it from a source which is non-human. These non-human amino acid residues are often referred to as “import” residues, which are typically taken from an “import” variable domain. Humanization can be essentially performed following the method of Winter and co-workers [Jones et al., Nature, 321:522-525 (1986); Riechmann et al., Nature, 332:323-327 (1988); Verhoeyen et al., Science, 239:1534-1536 (1988)], by substituting rodent CDRs or CDR sequences for the corresponding sequences of a human antibody. Accordingly, such “humanized” antibodies are chimeric antibodies (U.S. Pat. No. 4,816,567), wherein substantially less than an intact human variable domain has been substituted by the corresponding sequence from a non-human species. In practice, humanized antibodies are typically human antibodies in which some CDR residues and possibly some FR residues are substituted by residues from analogous sites in rodent antibodies.

[0735] Human antibodies can also be produced using various techniques known in the art, including phage display libraries [Hoogenboom and Winter, J. Mol. Biol., 227:381 (1991); Marks et al., J. Mol. Biol., 222:581 (1991)]. The techniques of Cole et al. and Boerner et al. are also available for the preparation of human monoclonal antibodies (Cole et al., Monoclonal Antibodies and Cancer Therapy, Alan R. Liss, p. 77 (1985) and Boerner et al., J. Immunol., 147(1):86-95 (1991)]. Similarly, human antibodies can be made by introducing of human immunoglobulin loci into transgenic animals, e.g., mice in which the endogenous immunoglobulin genes have been partially or completely inactivated. Upon challenge, human antibody production is observed, which closely resembles that seen in humans in all respects, including gene rearrangement, assembly, and antibody repertoire. This approach is described, for example, in U.S. Pat. Nos. 5,545,807; 5,545,806; 5,569,825; 5,625,126; 5,633,425; 5,661,016, and in the following scientific publications: Marks et al., Bio/Technology 10, 779-783 (1992); Lonberg et al., Nature 368 856-859 (1994); Morrison, Nature 368, 812-13 (1994); Fishwild et al., Nature Biotechnology 14, 845-51 (1996); Neuberger, Nature Biotechnology 14, 826 (1996); Lonberg and Huszar, Intern. Rev. Immunol. 13 65-93 (1995).

[0736] The antibodies may also be affinity matured using known selection and/or mutagenesis methods as described above. Preferred affinity matured antibodies have an affinity which is five times, more preferably 10 times, even more preferably 20 or 30 times greater than the starting antibody (generally murine, humanized or human) from which the matured antibody is prepared.

[0737] 4. Bispecific Antibodies

[0738] Bispecific antibodies are monoclonal, preferably human or humanized, antibodies that have binding specificities for at least two different antigens. In the present case, one of the binding specificities is for the PRO, the other one is for any other antigen, and preferably for a cell-surface protein or receptor or receptor subunit.

[0739] Methods for making bispecific antibodies are known in the art. Traditionally, the recombinant production of bispecific antibodies is based on the co-expression of two immunoglobulin heavy-chain/light-chain pairs, where the two heavy chains have different specificities [Milstein and Cuello, Nature, 305:537-539 (1983)]. Because of the random assortment of immunoglobulin heavy and light chains, these hybridomas (quadromas) produce a potential mixture of ten different antibody molecules, of which only one has the correct bispecific structure. The purification of the correct molecule is usually accomplished by affinity chromatography steps. Similar procedures are disclosed in WO 93/08829, published 13 May 1993, and in Traunecker et al., EMBO J., 10:3655-3659 (1991).

[0740] Antibody variable domains with the desired binding specificities (antibody-antigen combining sites) can be fused to immunoglobulin constant domain sequences. The fusion preferably is with an immunoglobulin heavy-chain constant domain, comprising at least part of the hinge, CH2, and CH3 regions. It is preferred to have the first heavy-chain constant region (CH1) containing the site necessary for light-chain binding present in at least one of the fusions. DNAs encoding the immunoglobulin heavy-chain fusions and, if desired, the immunoglobulin light chain, are inserted into separate expression vectors, and are co-transfected into a suitable host organism. For further details of generating bispecific antibodies see, for example, Suresh et al., Methods in Enzymology, 121:210 (1986).

[0741] According to another approach described in WO 96/27011, the interface between a pair of antibody molecules can be engineered to maximize the percentage of heterodimers which are recovered from recombinant cell culture. The preferred interface comprises at least a part of the CH3 region of an antibody constant domain. In this method, one or more small amino acid side chains from the interface of the first antibody molecule are replaced with larger side chains (e.g. tyrosine or tryptophan). Compensatory “cavities” of identical or similar size to the large side chain(s) are created on the interface of the second antibody molecule by replacing large amino acid side chains with smaller ones (e.g. alanine or threonine). This provides a mechanism for increasing the yield of the heterodimer over other unwanted end-products such as homodimers.

[0742] Bispecific antibodies can be prepared as full length antibodies or antibody fragments (e.g. F(ab′)₂ bispecific antibodies). Techniques for generating bispecific antibodies from antibody fragments have been described in the literature. For example, bispecific antibodies can be prepared can be prepared using chemical linkage. Brennan et al., Science 229:81 (1985) describe a procedure wherein intact antibodies are proteolytically cleaved to generate F(ab′)₂ fragments. These fragments are reduced in the presence of the dithiol complexing agent sodium arsenite to stabilize vicinal dithiols and prevent intermolecular disulfide formation. The Fab′ fragments generated are then converted to thionitrobenzoate (TNB) derivatives. One of the Fab′-TNB derivatives is then reconverted to the Fab′-thiol by reduction with mercaptoethylamine and is mixed with an equimolar amount of the other Fab′-TNB derivative to form the bispecific antibody. The bispecific antibodies produced can be used as agents for the selective immobilization of enzymes.

[0743] Fab′ fragments may be directly recovered from E. coli and chemically coupled to form bispecific antibodies. Shalaby et al., J. Exp. Med. 175:217-225 (1992) describe the production of a fully humanized bispecific antibody F(ab′)₂ molecule. Each Fab′ fragment was separately secreted from E. coli and subjected to directed chemical coupling in vitro to form the bispecific antibody. The bispecific antibody thus formed was able to bind to cells overexpressing the ErbB2 receptor and normal human T cells, as well as trigger the lytic activity of human cytotoxic lymphocytes against human breast tumor targets.

[0744] Various technique for making and isolating bispecific antibody fragments directly from recombinant cell culture have also been described. For example, bispecific antibodies have been produced using leucine zippers. Kostelny et al., J. Immunol. 148(5):1547-1553 (1992). The leucine zipper peptides from the Fos and Jun proteins were linked to the Fab′ portions of two different antibodies by gene fusion. The antibody homodimers were reduced at the hinge region to form monomers and then re-oxidized to form the antibody heterodimers. This method can also be utilized for the production of antibody homodimers. The “diabody” technology described by Hollinger et al., Proc. Natl. Acad. Sci. USA 90:6444-6448 (1993) has provided an alternative mechanism for making bispecific antibody fragments. The fragments comprise a heavy-chain variable domain (V_{H}) connected to a light-chain variable domain (V_{L}) by a linker which is too short to allow pairing between the two domains on the same chain. Accordingly, the V_{H} and V_{L} domains of one fragment are forced to pair with the complementary V_{L} and V_{H} domains of another fragment, thereby forming two antigen-binding sites. Another strategy for making bispecific antibody fragments by the use of single-chain Fv (sFv) dimers has also been reported. See, Gruber et al., J. Immunol. 152:5368 (1994).

Antibodies with more than two valencies are contemplated. For example, trispecific antibodies can be prepared. Tutt et al., J. Immunol. 147:60 (1991).

[0745] Exemplary bispecific antibodies may bind to two different epitopes on a given PRO polypeptide herein. Alternatively, an anti-PRO polypeptide arm may be combined with an arm which binds to a triggering molecule on a leukocyte such as a T-cell receptor molecule (e.g. CD2, CD3, CD28, or B7), or Fc receptors for IgG (FcγR), such as FcγRI (CD64), FcγRII (CD32) and FcγRIII (CD16) so as to focus cellular defense mechanisms to the cell expressing the particular PRO polypeptide. Bispecific antibodies may also be used to localize cytotoxic agents to cells which express a particular PRO polypeptide. These antibodies possess a PRO-binding arm and an arm which binds a cytotoxic agent or a radionuclide chelator, such as EOTUBE, DPTA, DOTA, or TETA. Another bispecific antibody of interest binds the PRO polypeptide and further binds tissue factor (TF).

[0746] 5. Heteroconjugate Antibodies

[0747] Heteroconjugate antibodies are also within the scope of the present invention. Heteroconjugate antibodies are composed of two covalently joined antibodies. Such antibodies have, for example, been proposed to target immune system cells to unwanted cells [U.S. Pat. No. 4,676,980], and for treatment of HIV infection [WO 91/00360; WO 92/200373; EP 03089]. It is contemplated that the antibodies may be prepared in vitro using known methods in synthetic protein chemistry, including those involving crosslinking agents. For example, immunotoxins may be constructed using a disulfide exchange reaction or by forming a thioether bond. Examples of suitable reagents for this purpose include iminothiolate and methyl-4-mercaptobutyrimidate and those disclosed, for example, in U.S. Pat. No. 4,676,980.

[0748] 6. Effector Function Engineering

[0749] It may be desirable to modify the antibody of the invention with respect to effector function, so as to enhance, e.g., the effectiveness of the antibody in treating cancer. For example, cysteine residue(s) may be introduced into the Fc region, thereby allowing interchain disulfide bond formation in this region. The homodimeric antibody thus generated may have improved internalization capability and/or increased complement-mediated cell killing and antibody-dependent cellular cytotoxicity (ADCC). See Caron et al., J. Exp Med., 176: 1191-1195 (1992) and Shopes, J. Immunol., 148: 2918-2922 (1992). Homodimeric antibodies with enhanced anti-tumor activity may also be prepared using heterobifunctional cross-linkers as described in Wolff et al. Cancer Research, 53: 2560-2565 (1993). Alternatively, an antibody can be engineered that has dual Fc regions and may thereby have enhanced complement lysis and ADCC capabilities. See Stevenson et al., Anti-Cancer Drug Design, 3: 219-230 (1989).

[0750] 7. Immunoconjugates

[0751] The invention also pertains to immunoconjugates comprising an antibody conjugated to a cytotoxic agent such as a chemotherapeutic agent, toxin (e.g., an enzymatically active toxin of bacterial, fungal, plant, or animal origin, or fragments thereof), or a radioactive isotope (i.e., a radioconjugate).

[0752] Chemotherapeutic agents useful in the generation of such immunoconjugates have been described above. Enzymatically active toxins and fragments thereof that can be used include diphtheria A chain, nonbinding active fragments of diphtheria toxin, exotoxin A chain (from Pseudomonas aeruginosa), ricin A chain, abrin A chain, modeccin A chain, alpha-sarcin, Aleurites fordii proteins, dianthin proteins, Phytolaca americana proteins (PAPI, PAPII, and PAP-S), momordica charantia inhibitor, curcin, crotin, sapaonaria officinalis inhibitor, gelonin, mitogellin, restrictocin, phenomycin, enomycin, and the tricothecenes. A variety of radionuclides are available for the production of radioconjugated antibodies. Examples include ²¹²Bi, ¹³¹I, ¹³¹In, ⁹⁰Y, and ¹⁸⁶Re.

[0753] Conjugates of the antibody and cytotoxic agent are made using a variety of bifunctional protein-coupling agents such as N-succinimidyl-3-(2-pyridyldithiol) propionate (SPDP), iminothiolane (IT), bifunctional derivatives of imidoesters (such as dimethyl adipimidate HCL), active esters (such as disuccinimidyl suberate), aldehydes (such as glutareldehyde), bis-azido compounds (such as bis(p-azidobenzoyl)hexanediamine), bis-diazonium derivatives (such as bis-(p-diazoniumbenzoyl)-ethylenediamine), diisocyanates (such as tolyene 2,6-diisocyanate), and bis-active fluorine compounds (such as 1,5-difluoro-2,4-dinitrobenzene). For example, a ricin immunotoxin can be prepared as described in Vitetta et al., Science, 238: 1098 (1987). Carbon-14-labeled 1-isothiocyanatobenzyl-3-methyldiethylene triaminepentaacetic acid (MX-DTPA) is an exemplary chelating agent for conjugation of radionucleotide to the antibody. See WO94/11026.

[0754] In another embodiment, the antibody may be conjugated to a “receptor” (such streptavidin) for utilization in tumor pretargeting wherein the antibody-receptor conjugate is administered to the patient, followed by removal of unbound conjugate from the circulation using a clearing agent and then administration of a “ligand” (e.g., avidin) that is conjugated to a cytotoxic agent (e.g., a radionucleotide).

[0755] 8. Immunoliposomes

[0756] The antibodies disclosed herein may also be formulated as immunoliposomes. Liposomes containing the antibody are prepared by methods known in the art, such as described in Epstein et al., Proc. Natl. Acad. Sci. USA, 82: 3688 (1985); Hwang et al., Proc. Natl. Acad. Sci. USA, 77: 4030 (1980); and U.S. Pat. Nos. 4,485,045 and 4,544,545. Liposomes with enhanced circulation time are disclosed in U.S. Pat. No. 5,013,556.

[0757] Particularly useful liposomes can be generated by the reverse-phase evaporation method with a lipid composition comprising phosphatidylcholine, cholesterol, and PEG-derivatized phosphatidylethanolamine (PEG-PE). Liposomes are extruded through filters of defined pore size to yield liposomes with the desired diameter. Fab′ fragments of the antibody of the present invention can be conjugated to the liposomes as described in Martin et al., J. Biol. Chem., 257: 286-288 (1982) via a disulfide-interchange reaction. A chemotherapeutic agent (such as Doxorubicin) is optionally contained within the liposome. See Gabizon et al., J. National Cancer Inst., 81(19): 1484 (1989).

[0758] L. Pharmaceutical Compositions

[0759] The active PRO molecules of the invention (e.g., PRO polypeptides, anti-PRO antibodies, and/or variants of each) as well as other molecules identified by the screening assays disclosed above, can be administered for the treatment of immune related diseases, in the form of pharmaceutical compositions.

[0760] Therapeutic formulations of the active PRO molecule, preferably a polypeptide or antibody of the invention, are prepared for storage by mixing the active molecule having the desired degree of purity with optional pharmaceutically acceptable carriers, excipients or stabilizers (Remington's Pharmaceutical Sciences 16th edition, Osol, A. Ed. [1980]), in the form of lyophilized formulations or aqueous solutions. Acceptable carriers, excipients, or stabilizers are nontoxic to recipients at the dosages and concentrations employed, and include buffers such as phosphate, citrate, and other organic acids; antioxidants including ascorbic acid and methionine; preservatives (such as octadecyldimethylbenzyl ammonium chloride; hexamethonium chloride; benzalkonium chloride, benzethonium chloride; phenol, butyl or benzyl alcohol; alkyl parabens such as methyl or propyl paraben; catechol; resorcinol; cyclohexanol; 3-pentanol; and m-cresol); low molecular weight (less than about 10 residues) polypeptides; proteins, such as serum albumin, gelatin, or immunoglobulins; hydrophilic polymers such as polyvinylpyrrolidone; amino acids such as glycine, glutamine, asparagine, histidine, arginine, or lysine; monosaccharides, disaccharides, and other carbohydrates including glucose, mannose, or dextrins; chelating agents such as EDTA; sugars such as sucrose, mannitol, trehalose or sorbitol; salt-forming counter-ions such as sodium; metal complexes (e.g., Zn-protein complexes); and/or non-ionic surfactants such as TWEEN™, PLURONICS™ or polyethylene glycol (PEG).

[0761] Compounds identified by the screening assays disclosed herein can be formulated in an analogous manner, using standard techniques well known in the art.

[0762] Lipofections or liposomes can also be used to deliver the PRO molecule into cells. Where antibody fragments are used, the smallest inhibitory fragment which specifically binds to the binding domain of the target protein is preferred. For example, based upon the variable region sequences of an antibody, peptide molecules can be designed which retain the ability to bind the target protein sequence. Such peptides can be synthesized chemically and/or produced by recombinant DNA technology (see, e.g., Marasco et al., Proc. Natl. Acad. Sci. USA 90, 7889-7893 [1993]).

[0763] The formulation herein may also contain more than one active compound as necessary for the particular indication being treated, preferably those with complementary activities that do not adversely affect each other. Alternatively, or in addition, the composition may comprise a cytotoxic agent, cytokine or growth inhibitory agent. Such molecules are suitably present in combination in amounts that are effective for the purpose intended.

[0764] The active PRO molecules may also be entrapped in microcapsules prepared, for example, by coacervation techniques or by interfacial polymerization, for example, hydroxymethylcellulose or gelatin-microcapsules and poly-(methylmethacylate) microcapsules, respectively, in colloidal drug delivery systems (for example, liposomes, albumin microspheres, microemulsions, nano-particles and nanocapsules) or in macroemulsions. Such techniques are disclosed in Remington's Pharmaceutical Sciences 16th edition, Osol, A. Ed. (1980).

[0765] The formulations to be used for in vivo administration must be sterile. This is readily accomplished by filtration through sterile filtration membranes.

[0766] Sustained-release preparations or the PRO molecules may be prepared. Suitable examples of sustained-release preparations include semipermeable matrices of solid hydrophobic polymers containing the antibody, which matrices are in the form of shaped articles, e.g., films, or microcapsules. Examples of sustained-release matrices include polyesters, hydrogels (for example, poly(2-hydroxyethyl-methacrylate), or poly(vinylalcohol)), polylactides (U.S. Pat. No. 3,773,919), copolymers of L-glutamic acid and γ-ethyl-L-glutamate, non-degradable ethylene-vinyl acetate, degradable lactic acid-glycolic acid copolymers such as the LUPRON DEPOT™ (injectable microspheres composed of lactic acid-glycolic acid copolymer and leuprolide acetate), and poly-D-(−)-3-hydroxybutyric acid. While polymers such as ethylene-vinyl acetate and lactic acid-glycolic acid enable release of molecules for over 100 days, certain hydrogels release proteins for shorter time periods. When encapsulated antibodies remain in the body for a long time, they may denature or aggregate as a result of exposure to moisture at 37° C., resulting in a loss of biological activity and possible changes in immunogenicity. Rational strategies can be devised for stabilization depending on the mechanism involved. For example, if the aggregation mechanism is discovered to be intermolecular S—S bond formation through thio-disulfide interchange, stabilization may be achieved by modifying sulfhydryl residues, lyophilizing from acidic solutions, controlling moisture content, using appropriate additives, and developing specific polymer matrix compositions.

[0767] M. Methods of Treatment

[0768] It is contemplated that the polypeptides, antibodies and other active compounds of the present invention may be used to treat various immune related diseases and conditions, such as B cell mediated diseases, including those characterized by stimulation of B-cell proliferation, inhibition of B-cell proliferation, increased or decreased Ig production or the inhibition thereof.

[0769] Exemplary conditions or disorders to be treated with the polypeptides, antibodies and other compounds of the invention, include, but are not limited to: systemic lupus erythematosis, X-linked infantile hypogammaglobulinemia, polysaccaride antigen unresponsiveness, selective IgA deficiency, selective IgM deficiency, selective deficiency of IgG subclasses, immunodeficiency with hyper Ig-M, transient hypogammaglobulinemia of infancy, Burkitt's lymphoma, Intermediate lymphoma, follicular lymphoma, typeII hypersensitivity, rheumatoid arthritis, autoimmune mediated hemolytic anemia, myesthenia gravis, hypoadrenocorticism, glomerulonephritis and ankylosing spondylitis.

[0770] In systemic lupus erythematosus (SLE), the central mediator of disease is the production of auto-reactive antibodies to self proteins/tissues and the subsequent generation of immune-mediated inflammation. Antibodies either directly or indirectly mediate tissue injury. Multiple organs and systems that are affected clinically include kidney, lung, musculoskeletal system, mucocutaneous, eye, central nervous system, cardiovascular system, gastrointestinal tract, bone marrow and blood.

[0771] In patients with X-linked infantile hypogammaglobulinemia, the B cells have a deficient kinase which leads to a lack of differentiation from the pre-B cell stage. The consequences of this is that these cells do not secrete immunoglobulin. Children with this disease usually show no symptoms until 6 months of age, an age which corresponds to the loss of maternal antibodies. Symptoms consist of pneumonia, meningitis, dermatitis with some instances of arthritis and malabsorption. Treatment at this time involves the use of intravenous gamma globulin replacement therapy.

[0772] Other diseases in which intervention of the immune and/or inflammatory response have benefit are infectious disease including but not limited to viral infection (including but not limited to Epstein-Barr virus) which stimulate the proliferation/Ig secretion of B-cells can be utilized therapeutically to enhance the immune response to infectious agents, diseases of immunodeficiency (molecules/derivatives/agonists) which stimulate B-cell proliferation/Ig secretion can be utilized therapeutically to enhance the immune response for conditions of inherited, acquired, infectious induced (as in HIV infection), or iatrogenic (i.e., as from chemotherapy) immunodeficiency, and neoplasia.

[0773] B-cell leukemias can be treated by antibodies against surface proteins. This is illustrated in a regimen using antibodies to CD9 or CD10 which are often expressed at high levels in B-cell leukemias. Bone marrow is removed from patients with this type of leukemia and is treated with toxin-conjugated anti-CD9/anti-CD10, while the patient is treated with high doses of chemotherapy or radiation therapy. The treated marrow now devoid of leukemic cells, is reintroduced into the patient to repopulate the hematopoeitic lineage.

[0774] Additionally, inhibition of molecules with proinflammatory properties may have therapeutic benefit in reperfusion injury; stroke; myocardial infarction; atherosclerosis; acute lung injury; hemorrhagic shock; burn; sepsis/septic shock; acute tubular necrosis; endometriosis; degenerative joint disease and pancreatis.

[0775] The compounds of the present invention, e.g., polypeptides or antibodies, are administered to a mammal, preferably a human, in accord with known methods, such as intravenous administration as a bolus or by continuous infusion over a period of time, by intramuscular, intraperitoneal, intracerobrospinal, subcutaneous, intra-articular, intrasynovial, intrathecal, oral, topical, or inhalation (intranasal, intrapulmonary) routes. Intravenous or inhaled administration of polypeptides and antibodies is preferred.

[0776] In immunoadjuvant therapy, other therapeutic regimens, such administration of an anti-cancer agent, may be combined with the administration of the proteins, antibodies or compounds of the instant invention. For example, the patient to be treated with a the immunoadjuvant of the invention may also receive an anti-cancer agent (chemotherapeutic agent) or radiation therapy. Preparation and dosing schedules for such chemotherapeutic agents may be used according to manufacturers' instructions or as determined empirically by the skilled practitioner. Preparation and dosing schedules for such chemotherapy are also described in Chemotherapy Service Ed., M. C. Perry, Williams & Wilkins, Baltimore, Md. (1992). The chemotherapeutic agent may precede, or follow administration of the immunoadjuvant or may be given simultaneously therewith. Additionally, an anti-estrogen compound such as tamoxifen or an anti-progesterone such as onapristone (see, EP 616812) may be given in dosages known for such molecules.

[0777] It may be desirable to also administer antibodies against other immune disease associated or tumor associated antigens, such as antibodies which bind to CD20, CD11a, CD18, ErbB2, EGFR, ErbB3, ErbB4, or vascular endothelial factor (VEGF). Alternatively, or in addition, two or more antibodies binding the same or two or more different antigens disclosed herein may be coadministered to the patient. Sometimes, it may be beneficial to also administer one or more cytokines to the patient. In one embodiment, the PRO polypeptides are coadministered with a growth inhibitory agent. For example, the growth inhibitory agent may be administered first, followed by a PRO polypeptide. However, simultaneous administration or administration first is also contemplated. Suitable dosages for the growth inhibitory agent are those presently used and may be lowered due to the combined action (synergy) of the growth inhibitory agent and the PRO polypeptide.

[0778] For the treatment or reduction in the severity of immune related disease, the appropriate dosage of an a compound of the invention will depend on the type of disease to be treated, as defined above, the severity and course of the disease, whether the agent is administered for preventive or therapeutic purposes, previous therapy, the patient's clinical history and response to the compound, and the discretion of the attending physician. The compound is suitably administered to the patient at one time or over a series of treatments.

[0779] For example, depending on the type and severity of the disease, about 1 μg/kg to 15 mg/kg (e.g., 0.1-20 mg/kg) of polypeptide or antibody is an initial candidate dosage for administration to the patient, whether, for example, by one or more separate administrations, or by continuous infusion. A typical daily dosage might range from about 1 μg/kg to 100 mg/kg or more, depending on the factors mentioned above. For repeated administrations over several days or longer, depending on the condition, the treatment is sustained until a desired suppression of disease symptoms occurs. However, other dosage regimens may be useful. The progress of this therapy is easily monitored by conventional techniques and assays.

[0780] N. Articles of Manufacture

[0781] In another embodiment of the invention, an article of manufacture containing materials (e.g., comprising a PRO molecule) useful for the diagnosis or treatment of the disorders described above is provided. The article of manufacture comprises a container and an instruction. Suitable containers include, for example, bottles, vials, syringes, and test tubes. The containers may be formed from a variety of materials such as glass or plastic. The container holds a composition which is effective for diagnosing or treating the condition and may have a sterile access port (for example the container may be an intravenous solution bag or a vial having a stopper pierceable by a hypodermic injection needle). The active agent in the composition is usually a polypeptide or an antibody of the invention. An instruction or label on, or associated with, the container indicates that the composition is used for diagnosing or treating the condition of choice. The article of manufacture may further comprise a second container comprising a pharmaceutically-acceptable buffer, such as phosphate-buffered saline, Ringer's solution and dextrose solution. It may further include other materials desirable from a commercial and user standpoint, including other buffers, diluents, filters, needles, syringes, and package inserts with instructions for use.

[0782] O. Diagnosis and Prognosis of Immune Related Disease

[0783] Cell surface proteins, such as proteins which are overexpressed in certain immune related diseases, are excellent targets for drug candidates or disease treatment. The same proteins along with secreted proteins encoded by the genes amplified in immune related disease states find additional use in the diagnosis and prognosis of these diseases. For example, antibodies directed against the protein products of genes amplified in multiple sclerosis, rheumatoid arthritis, or another immune related disease, can be used as diagnostics or prognostics.

[0784] For example, antibodies, including antibody fragments, can be used to qualitatively or quantitatively detect the expression of proteins encoded by amplified or overexpressed genes (“marker gene products”). The antibody preferably is equipped with a detectable, e.g., fluorescent label, and binding can be monitored by light microscopy, flow cytometry, fluorimetry, or other techniques known in the art. These techniques are particularly suitable, if the overexpressed gene encodes a cell surface protein Such binding assays are performed essentially as described above.

[0785] In situ detection of antibody binding to the marker gene products can be performed, for example, by immunofluorescence or immunoelectron microscopy. For this purpose, a histological specimen is removed from the patient, and a labeled antibody is applied to it, preferably by overlaying the antibody on a biological sample. This procedure also allows for determining the distribution of the marker gene product in the tissue examined. It will be apparent for those skilled in the art that a wide variety of histological methods are readily available for in situ detection.

[0786] The following examples are offered for illustrative purposes only, and are not intended to limit the scope of the present invention in any way.

[0787] All patent and literature references cited in the present specification are hereby incorporated by reference in their entirety.

### EXAMPLES

[0788] Commercially available reagents referred to in the examples were used according to manufacturer's instructions unless otherwise indicated. The source of those cells identified in the following examples, and throughout the specification, by ATCC accession numbers is the American Type Culture Collection, Manassas, Va.

### Example 1

### Microarray Analysis of Stimulated B-Cells

[0789] Nucleic acid microarrays, often containing thousands of gene sequences, are useful for identifying differentially expressed genes in diseased tissues as compared to their normal counterparts. Using nucleic acid microarrays, test and control mRNA samples from test and control tissue samples are reverse transcribed and labeled to generate cDNA probes. The cDNA probes are then hybridized to an array of nucleic acids immobilized on a solid support. The array is configured such that the sequence and position of each member of the array is known. For example, a selection of genes known to be expressed in certain disease states may be arrayed on a solid support. Hybridization of a labeled probe with a particular array member indicates that the sample from which the probe was derived expresses that gene. If the hybridization signal of a probe from a test (in this example, stimulated B cells) sample is greater than hybridization signal of a probe from a control (in this instance, non-stimulated B cells) sample, the gene or genes overexpressed in the test tissue are identified. The implication of this result is that an overexpressed protein in a test tissue is useful not only as a diagnostic marker for the presence of the disease condition, but also as a therapeutic target for treatment of the disease condition.

[0790] The methodology of hybridization of nucleic acids and microarray technology is well known in the art. In one example, the specific preparation of nucleic acids for hybridization and probes, slides, and hybridization conditions are all detailed in PCT Patent Application Serial No. PCT/US01/10482, filed on Mar. 30, 2001 and which is herein incorporated by reference.

[0791] In this experiment, primary B cells were isolated from peripheral blood provided by 3 normal male donors. B cells were isolated by negative selection using the B Cell Isolation Kit with the MACS™ magnetic cell sorting system (Miltenyi Biotec, Auburn Calif.). The cell purity was determined by fluorescence antibody staining with anti-CD19 vs isotype antibody control and subsequent FACS analysis to determine purity. The purity of the B cell population was above 90% for each donor.

[0792] The isolated cells were suspended in RPMI1640 media supplemented with 10% FBS, 2 mM L-glutamine, 55 mM 2-ME, 100 units/mL of Penicillin, 100 mg/mL of streptomycin. Cells were cultured at a density of 3×10⁵ cells/mL in 5 mL/well in 6 well FALCON™ polystyrene tissue culture plates. Cells were cultured for 23 hours at 37° C. either in the presence and absence of anti-CD40 (10 mg/mL) and IL-4 (100 ng/ml). The immune competence of the isolated B cells to respond to stimulation by anti-CD40/IL-4 was determined by induction of expression of the cell surface protein, CD69. The increase in expression of CD69 was monitored at a 0 timepoint and 23 hours after culture with anti-CD40/IL-4, using fluorescence staining with anti-CD69 antibodies.

[0793] Total RNA was extracted from the cultured B cells at the 0 timepoint and at 23 hours with and without the anti-CD40/IL-4 stimulation using the Qiagen Rneasy Maxi Kit™. The RNA was extracted from columns treated with DNAse I as per Qiagen protocol and eluted using DEPC treated water. The extracted RNA was run on Affimax (Affymetrix Inc. Santa Clara, Calif.) microarrays. Non-stimulated cells harvested at the 0 timepoint were subjected to the same analysis. Genes were compared whose expression was upregulated at the 23 hour timepoint in stimulated vs. non-stimulated cells.

[0794] Below are the results of these experiments, demonstrating that various PRO polypeptides of the present invention are significantly overexpressed in isolated B cells stimulated by anti-CD40/IL-4 as compared to isolated, non-stimulated B cells. As described above, these data demonstrate that the PRO polypeptides of the present invention are useful not only as diagnostic markers for the presence of one or more immune disorders, but also serve as therapeutic targets for the treatment of those immune disorders.

[0795] The nucleic acids in FIG. 1 (SEQ ID NO:1), FIG. 2A-B (SEQ ID NO:2), FIG. 4 (SEQ ID NO:4), FIG. 6 (SEQ ID NO:6), FIG. 8 (SEQ ID NO:8), FIG. 10 (SEQ ID NO:10), FIG. 12 (SEQ ID NO:12), FIG. 14 (SEQ ID NO:14), FIG. 16 (SEQ ID NO:16), FIG. 18 (SEQ ID NO:18), FIG. 20 (SEQ ID NO:20), FIG. 22 (SEQ ID NO:22), FIG. 24 (SEQ ID NO:24), FIG. 26 (SEQ ID NO:26), FIG. 28 (SEQ ID NO:28), FIG. 30 (SEQ ID NO:30), FIG. 32 (SEQ ID NO:32), FIG. 34 (SEQ ID NO:34), FIG. 36A-B (SEQ ID NO:36), FIG. 38 (SEQ ID NO:38), FIG. 40 (SEQ ID NO:40), FIG. 42 (SEQ ID NO:42), FIG. 44A-B (SEQ ID NO:44), FIG. 46A-B (SEQ ID NO:46), FIG. 48 (SEQ ID NO:48), FIG. 50A-B (SEQ ID NO:50), FIG. 52 (SEQ ID NO:52), FIG. 54 (SEQ ID NO:54), FIG. 56 (SEQ ID NO:56), FIG. 58 (SEQ ID NO:58), FIG. 60 (SEQ ID NO:60), FIG. 62 (SEQ ID NO:62), FIG. 64 (SEQ ID NO:64), FIG. 66 (SEQ ID NO:66), FIG. 68 (SEQ ID NO:68), FIG. 70 (SEQ ID NO:70), FIG. 72A-B (SEQ ID NO:72), FIG. 74 (SEQ ID NO:74), FIG. 76 (SEQ ID NO:76), FIG. 78 (SEQ ID NO:78), FIG. 80 (SEQ ID NO:80), FIG. 82 (SEQ ID NO:82), FIG. 84 (SEQ ID NO:84), FIG. 86 (SEQ ID NO:86), FIG. 88 (SEQ ID NO:88), FIG. 90 (SEQ ID NO:90), FIG. 92 (SEQ ID NO:92), FIG. 94A-B (SEQ ID NO:94), FIG. 96 (SEQ ID NO:96), FIG. 98 (SEQ ID NO:98), FIG. 100 (SEQ ID NO:100), FIG. 102 (SEQ ID NO:102), FIG. 104 (SEQ ID NO:104), FIG. 106 (SEQ ID NO:106), FIG. 108 (SEQ ID NO:108), FIG. 110A-B (SEQ ID NO:110), FIG. 112 (SEQ ID NO:112), FIG. 114 A-B (SEQ ID NO:114), FIG. 116 (SEQ ID NO:116), FIG. 118 (SEQ ID NO:118), FIG. 120 (SEQ ID NO:120), FIG. 122A-B (SEQ ID NO:122), FIG. 124A-B (SEQ ID NO:124), FIG. 126 (SEQ ID NO:126), FIG. 128A-B (SEQ ID NO:128), FIG. 130 (SEQ ID NO:130), FIG. 132 (SEQ ID NO:132), FIG. 134 (SEQ ID NO:134), FIG. 136 (SEQ ID NO:136), FIG. 138 (SEQ ID NO:138), FIG. 140 (SEQ ID NO:140), FIG. 142 (SEQ ID NO:142), FIG. 144A-B (SEQ ID NO:144), FIG. 146 (SEQ ID NO:146), FIG. 148 (SEQ ID NO:148), FIG. 150 (SEQ ID NO:150), FIG. 152 (SEQ ID NO:152), FIG. 154 (SEQ ID NO:154), FIG. 156A-B (SEQ ID NO:156), FIG. 158 (SEQ ID NO:158), FIG. 160 (SEQ ID NO:160), FIG. 162 (SEQ ID NO:162), FIG. 164 (SEQ ID NO:164), FIG. 166A-B (SEQ ID NO:166), FIG. 168A-B (SEQ ID NO:168), FIG. 170 (SEQ ID NO:170), FIG. 172 (SEQ ID NO:172), FIG. 174A-B (SEQ ID NO:174), FIG. 176 (SEQ ID NO:176), FIG. 178A-B (SEQ ID NO:178), FIG. 180 (SEQ ID NO:180), FIG. 182 (SEQ ID NO:182), FIG. 184 (SEQ ID NO:184), FIG. 186 (SEQ ID NO:186), FIG. 188 (SEQ ID NO:188), FIG. 190A-B (SEQ ID NO:190), FIG. 192A-B (SEQ ID NO:192), FIG. 194 (SEQ ID NO:194), FIG. 196 (SEQ ID NO:196), FIG. 198 (SEQ ID NO:198), FIG. 200A-B (SEQ ID NO:200), FIG. 202 (SEQ ID NO:202), FIG. 204 (SEQ ID NO:204), FIG. 206 (SEQ ID NO:206), FIG. 208 (SEQ ID NO:208), FIG. 210 (SEQ ID NO:210), FIG. 212 (SEQ ID NO:212), FIG. 214 (SEQ ID NO:214), FIG. 216A-B (SEQ ID NO:216), FIG. 218 (SEQ ID NO:218), FIG. 220A-B (SEQ ID NO:220), FIG. 222 (SEQ ID NO:222), FIG. 223 (SEQ ID NO:223), FIG. 224 (SEQ ID NO:224), FIG. 226 (SEQ ID NO:226), FIG. 228 (SEQ ID NO:228), FIG. 230 (SEQ ID NO:230), FIG. 231 (SEQ ID NO:231), FIG. 233 (SEQ ID NO:233), FIG. 234 (SEQ ID NO:234), FIG. 236A-B (SEQ ID NO:236), FIG. 238 (SEQ ID NO:238), FIG. 240 (SEQ ID NO:240), FIG. 241 (SEQ ID NO:241), FIG. 242 (SEQ ID NO:242), FIG. 244 (SEQ ID NO:244), FIG. 245 (SEQ ID NO:245), FIG. 247A-B (SEQ ID NO:247), FIG. 249 (SEQ ID NO:249), FIG. 251 (SEQ ID NO:251), FIG. 253 (SEQ ID NO:253), FIG. 255 (SEQ ID NO:255), FIG. 257 (SEQ ID NO:257), FIG. 259 (SEQ ID NO:259), FIG. 261 (SEQ ID NO:261), FIG. 263 (SEQ ID NO:263), FIG. 265 (SEQ ID NO:265), FIG. 267 (SEQ ID NO:267), FIG. 269 (SEQ ID NO:269), FIG. 271 (SEQ ID NO:271), FIG. 273 (SEQ ID NO:273), FIG. 275 (SEQ ID NO:275), FIG. 277 (SEQ ID NO:277), FIG. 279 (SEQ ID NO:279), FIG. 281 (SEQ ID NO:281), FIG. 283 (SEQ ID NO:283), FIG. 285 (SEQ ID NO:285), FIG. 287 (SEQ ID NO:287), FIG. 289A-B (SEQ ID NO:289), FIG. 291 (SEQ ID NO:291), FIG. 293A-B (SEQ ID NO:293), FIG. 295 (SEQ ID NO:295), FIG. 297 (SEQ ID NO:297), FIG. 299A-B (SEQ ID NO:299), FIG. 301 (SEQ ID NO:301), FIG. 303A-B (SEQ ID NO:303), FIG. 305A-B (SEQ ID NO:305), FIG. 307 (SEQ ID NO:307), FIG. 309 (SEQ ID NO:309), FIG. 311A-D (SEQ ID NO:311), FIG. 313 (SEQ ID NO:313), FIG. 315A-B (SEQ ID NO:315), FIG. 317 (SEQ ID NO:317), FIG. 319A-B (SEQ ID NO:319), FIG. 321 (SEQ ID NO:321), FIG. 322 (SEQ ID NO:322), FIG. 323 (SEQ ID NO:323), FIG. 325 (SEQ ID NO:325), FIG. 327 (SEQ ID NO:327), FIG. 328 (SEQ ID NO:328), FIG. 330 (SEQ ID NO:330), FIG. 331 (SEQ ID NO: 331), FIG. 333 (SEQ ID NO:333), FIG. 335A-B (SEQ ID NO:335), FIG. 337 (SEQ ID NO:337), FIG. 339 (SEQ ID NO:339), FIG. 341 (SEQ ID NO:341), FIG. 343 (SEQ ID NO:343), FIG. 345 (SEQ ID NO:345), FIG. 347 (SEQ ID NO:347), FIG. 349 (SEQ ID NO:349), FIG. 351 (SEQ ID NO:351), FIG. 353 (SEQ ID NO:353), FIG. 355 (SEQ ID NO:355), FIG. 357 (SEQ ID NO:357), FIG. 359 (SEQ ID NO:359), FIG. 361A-B (SEQ ID NO:361), FIG. 363 (SEQ ID NO:363), FIG. 365 (SEQ ID NO:365), FIG. 367A-C (SEQ ID NO:367), FIG. 369 (SEQ ID NO:369), FIG. 371 (SEQ ID NO:371), FIG. 373A-B (SEQ ID NO:373), FIG. 374 (SEQ ID NO:374), FIG. 376 (SEQ ID NO:376), FIG. 378 (SEQ ID NO:378), FIG. 380 (SEQ ID NO:380), FIG. 382 (SEQ ID NO:382), FIG. 384A-B (SEQ ID NO:384), FIG. 386 (SEQ ID NO:386), FIG. 388 (SEQ ID NO:388), FIG. 390 (SEQ ID NO:390), FIG. 391 (SEQ ID NO:391), FIG. 393 (SEQ ID NO:393), FIG. 395A-B (SEQ ID NO:395), FIG. 397 (SEQ ID NO:397), FIG. 398A-B (SEQ ID NO:398), FIG. 400 (SEQ ID NO:400), FIG. 401 (SEQ ID NO:401), FIG. 402A-B (SEQ ID NO:402), FIG. 404 (SEQ ID NO:404), FIG. 406 (SEQ ID NO:406), FIG. 407 (SEQ ID NO:407), FIG. 408 (SEQ ID NO:408), FIG. 409 (SEQ ID NO:409), FIG. 410 (SEQ ID NO:410), FIG. 412 (SEQ ID NO:412), FIG. 414 (SEQ ID NO:414), FIG. 416 (SEQ ID NO:416), FIG. 418 (SEQ ID NO:418), FIG. 420A-B (SEQ ID NO:420), FIG. 422 (SEQ ID NO:422), FIG. 424A-B (SEQ ID NO:424), FIG. 426 (SEQ ID NO:426), FIG. 428 (SEQ ID NO:428), FIG. 430 (SEQ ID NO:430), FIG. 432 (SEQ ID NO:432), FIG. 434 (SEQ ID NO:434), FIG. 436A-B (SEQ ID NO:436), FIG. 438A-B (SEQ ID NO:438), FIG. 440A-B (SEQ ID NO:440), FIG. 442A-B (SEQ ID NO:442), FIG. 444A-B (SEQ ID NO:444), FIG. 446A-B (SEQ ID NO:446), FIG. 448 (SEQ ID NO:448), FIG. 450A-B (SEQ ID NO:450), FIG. 452 (SEQ ID NO:452), FIG. 454 (SEQ ID NO:454), FIG. 456 (SEQ ID NO:456), FIG. 458 (SEQ ID NO:458), FIG. 459 (SEQ ID NO:459), FIG. 461 (SEQ ID NO:461), FIG. 463A-B (SEQ ID NO:463), FIG. 465 (SEQ ID NO:465), FIG. 467 (SEQ ID NO:467), FIG. 469A-B (SEQ ID NO:469), FIG. 470A-B (SEQ ID NO:470), FIG. 471A-C (SEQ ID NO:471), FIG. 473 (SEQ ID NO:473), FIG. 475 (SEQ ID NO:475), FIG. 477 (SEQ ID NO:477), FIG. 479 (SEQ ID NO:479), FIG. 481A-B (SEQ ID NO:481), FIG. 483 (SEQ ID NO:483), FIG. 485 (SEQ ID NO:485), FIG. 487 (SEQ ID NO:487), FIG. 489 (SEQ ID NO:489), FIG. 491A-B (SEQ ID NO:491), FIG. 493 (SEQ ID NO:493), FIG. 495 (SEQ ID NO:495), FIG. 497 (SEQ ID NO:497), FIG. 499 (SEQ ID NO:499), FIG. 501 (SEQ ID NO:501), FIG. 503 (SEQ ID NO:503) and FIG. 505 (SEQ ID NO:505) are upregulated upon stimulation with anti-CD40/IL-4.

### Example 2

### Use of PRO as a Hybridization Probe

[0796] The following method describes use of a nucleotide sequence encoding PRO as a hybridization probe.

[0797] DNA comprising the coding sequence of full-length or mature PRO as disclosed herein is employed as a probe to screen for homologous DNAs (such as those encoding naturally-occurring variants of PRO) in human tissue cDNA libraries or human tissue genomic libraries.

[0798] Hybridization and washing of filters containing either library DNAs is performed under the following high stringency conditions. Hybridization of radiolabeled PRO-derived probe to the filters is performed in a solution of 50% formamide, 5×SSC, 0.1% SDS, 0.1% sodium pyrophosphate, 50 mM sodium phosphate, pH 6.8, 2× Denhardt's solution, and 10% dextran sulfate at 42° C. for 20 hours. Washing of the filters is performed in an aqueous solution of 0.1×SSC and 0.1% SDS at 42° C.

[0799] DNAs having a desired sequence identity with the DNA encoding full-length native sequence PRO can then be identified using standard techniques known in the art.

### Example 3

### Expression of PRO in E. coli

[0800] This example illustrates preparation of an unglycosylated form of PRO by recombinant expression in E. coli.

[0801] The DNA sequence encoding PRO is initially amplified using selected PCR primers. The primers should contain restriction enzyme sites which correspond to the restriction enzyme sites on the selected expression vector. A variety of expression vectors may be employed. An example of a suitable vector is pBR322 (derived from E. coli; see Bolivar et al., Gene, 2:95 (1977)) which contains genes for ampicillin and tetracycline resistance. The vector is digested with restriction enzyme and dephosphorylated. The PCR amplified sequences are then ligated into the vector. The vector will preferably include sequences which encode for an antibiotic resistance gene, a trp promoter, a polyhis leader (including the first six STII codons, polyhis sequence, and enterokinase cleavage site), the PRO coding region, lambda transcriptional terminator, and an argU gene.

[0802] The ligation mixture is then used to transform a selected E. coli strain using the methods described in Sambrook et al., supra. Transformants are identified by their ability to grow on LB plates and antibiotic resistant colonies are then selected. Plasmid DNA can be isolated and confirmed by restriction analysis and DNA sequencing.

[0803] Selected clones can be grown overnight in liquid culture medium such as LB broth supplemented with antibiotics. The overnight culture may subsequently be used to inoculate a larger scale culture. The cells are then grown to a desired optical density, during which the expression promoter is turned on.

[0804] After culturing the cells for several more hours, the cells can be harvested by centrifugation. The cell pellet obtained by the centrifugation can be solubilized using various agents known in the art, and the solubilized PRO protein can then be purified using a metal chelating column under conditions that allow tight binding of the protein.

[0805] PRO may be expressed in E. coli in a poly-His tagged form, using the following procedure. The DNA encoding PRO is initially amplified using selected PCR primers. The primers will contain restriction enzyme sites which correspond to the restriction enzyme sites on the selected expression vector, and other useful sequences providing for efficient and reliable translation initiation, rapid purification on a metal chelation column, and proteolytic removal with enterokinase. The PCR-amplified, poly-His tagged sequences are then ligated into an expression vector, which is used to transform an E. coli host based on strain 52 (W3110 fuhA(tonA) lon galE rpoHts(htpRts) clpP(lacIq). Transformants are first grown in LB containing 50 mg/ml carbenicillin at 30° C. with shaking until an O.D.600 of 3-5 is reached. Cultures are then diluted 50-100 fold into CRAP media (prepared by mixing 3.57 g (NH₄)₂SO₄, 0.71 g sodium citrate.2H₂O, 1.07 g KCl, 5.36 g Difco yeast extract, 5.36 g Sheffield hycase SF in 500 mL water, as well as 110 mM MPOS, pH 7.3, 0.55% (w/v) glucose and 7 mM MgSO₄) and grown for approximately 20-30 hours at 30° C. with shaking. Samples are removed to verify expression by SDS-PAGE analysis, and the bulk culture is centrifuged to pellet the cells. Cell pellets are frozen until purification and refolding.

[0806] E. coli paste from 0.5 to 1 L fermentations (6-10 g pellets) is resuspended in 10 volumes (w/v) in 7 M guanidine, 20 mM Tris, pH 8 buffer. Solid sodium sulfite and sodium tetrathionate is added to make final concentrations of 0.1M and 0.02 M, respectively, and the solution is stirred overnight at 4° C. This step results in a denatured protein with all cysteine residues blocked by sulfitolization. The solution is centrifuged at 40,000 rpm in a Beckman Ultracentifuge for 30 min. The supernatant is diluted with 3-5 volumes of metal chelate column buffer (6 M guanidine, 20 mM Tris, pH 7.4) and filtered through 0.22 micron filters to clarify. The clarified extract is loaded onto a 5 ml Qiagen Ni-NTA metal chelate column equilibrated in the metal chelate column buffer. The column is washed with additional buffer containing 50 mM imidazole (Calbiochem, Utrol grade), pH 7.4. The protein is eluted with buffer containing 250 mM imidazole. Fractions containing the desired protein are pooled and stored at 4° C. Protein concentration is estimated by its absorbance at 280 nm using the calculated extinction coefficient based on its amino acid sequence.

[0807] The proteins are refolded by diluting the sample slowly into freshly prepared refolding buffer consisting of: 20 mM Tris, pH 8.6, 0.3 M NaCl, 2.5 M urea, 5 mM cysteine, 20 mM glycine and 1 mM EDTA. Refolding volumes are chosen so that the final protein concentration is between 50 to 100 micrograms/ml. The refolding solution is stirred gently at 4° C. for 12-36 hours. The refolding reaction is quenched by the addition of TFA to a final concentration of 0.4% (pH of approximately 3). Before further purification of the protein, the solution is filtered through a 0.22 micron filter and acetonitrile is added to 2-10% final concentration. The refolded protein is chromatographed on a Poros R1/H reversed phase column using a mobile buffer of 0.1% TFA with elution with a gradient of acetonitrile from 10 to 80%. Aliquots of fractions with A280 absorbance are analyzed on SDS polyacrylamide gels and fractions containing homogeneous refolded protein are pooled. Generally, the properly refolded species of most proteins are eluted at the lowest concentrations of acetonitrile since those species are the most compact with their hydrophobic interiors shielded from interaction with the reversed phase resin. Aggregated species are usually eluted at higher acetonitrile concentrations. In addition to resolving misfolded forms of proteins from the desired form, the reversed phase step also removes endotoxin from the samples.

[0808] Fractions containing the desired folded PRO polypeptide are pooled and the acetonitrile removed using a gentle stream of nitrogen directed at the solution. Proteins are formulated into 20 mM Hepes, pH 6.8 with 0.14 M sodium chloride and 4% mannitol by dialysis or by gel filtration using G25 Superfine (Pharmacia) resins equilibrated in the formulation buffer and sterile filtered.

[0809] Many of the PRO polypeptides disclosed herein were successfully expressed as described above.

### Example 4

### Expression of PRO in Mammalian Cells

[0810] This example illustrates preparation of a potentially glycosylated form of PRO by recombinant expression in mammalian cells.

[0811] The vector, pRK5 (see EP 307,247, published Mar. 15, 1989), is employed as the expression vector. Optionally, the PRO DNA is ligated into pRK5 with selected restriction enzymes to allow insertion of the PRO DNA using ligation methods such as described in Sambrook et al., supra. The resulting vector is called pRK5-PRO.

[0812] In one embodiment, the selected host cells may be 293 cells. Human 293 cells (ATCC CCL 1573) are grown to confluence in tissue culture plates in medium such as DMEM supplemented with fetal calf serum and optionally, nutrient components and/or antibiotics. About 10 μg pRK5-PRO DNA is mixed with about 1 μg DNA encoding the VA RNA gene [Thimmappaya et al., Cell, 31:543 (1982)] and dissolved in 500 μl of 1 mM Tris-HCl, 0.1 mM EDTA, 0.227 M CaCl₂. To this mixture is added, dropwise, 500 μl of 50 mM HEPES (pH 7.35), 280 mM NaCl, 1.5 mM NaPO₄, and a precipitate is allowed to form for 10 minutes at 25° C. The precipitate is suspended and added to the 293 cells and allowed to settle for about four hours at 37° C. The culture medium is aspirated off and 2 ml of 20% glycerol in PBS is added for 30 seconds. The 293 cells are then washed with serum free medium, fresh medium is added and the cells are incubated for about 5 days.

[0813] Approximately 24 hours after the transfections, the culture medium is removed and replaced with culture medium (alone) or culture medium containing 200 μCi/ml ³⁵S-cysteine and 200 μCi/ml ³⁵S-methionine. After a 12 hour incubation, the conditioned medium is collected, concentrated on a spin filter, and loaded onto a 15% SDS gel. The processed gel may be dried and exposed to film for a selected period of time to reveal the presence of PRO polypeptide. The cultures containing transfected cells may undergo further incubation (in serum free medium) and the medium is tested in selected bioassays.

[0814] In an alternative technique, PRO may be introduced into 293 cells transiently using the dextran sulfate method described by Somparyrac et al., Proc. Natl. Acad. Sci., 12:7575 (1981). 293 cells are grown to maximal density in a spinner flask and 700 μg pRK5-PRO DNA is added. The cells are first concentrated from the spinner flask by centrifugation and washed with PBS. The DNA-dextran precipitate is incubated on the cell pellet for four hours. The cells are treated with 20% glycerol for 90 seconds, washed with tissue culture medium, and re-introduced into the spinner flask containing tissue culture medium, 5 μg/ml bovine insulin and 0.1 μg/ml bovine transferrin. After about four days, the conditioned media is centrifuged and filtered to remove cells and debris. The sample containing expressed PRO can then be concentrated and purified by any selected method, such as dialysis and/or column chromatography.

[0815] In another embodiment, PRO can be expressed in CHO cells. The pRK5-PRO can be transfected into CHO cells using known reagents such as CaPO₄ or DEAE-dextran. As described above, the cell cultures can be incubated, and the medium replaced with culture medium (alone) or medium containing a radiolabel such as ³⁵S-methionine. After determining the presence of PRO polypeptide, the culture medium may be replaced with serum free medium. Preferably, the cultures are incubated for about 6 days, and then the conditioned medium is harvested. The medium containing the expressed PRO can then be concentrated and purified by any selected method.

[0816] Epitope-tagged PRO may also be expressed in host CHO cells. The PRO may be subcloned out of the pRK5 vector. The subclone insert can undergo PCR to fuse in frame with a selected epitope tag such as a poly-his tag into a Baculovirus expression vector. The poly-his tagged PRO insert can then be subcloned into a SV40 promoter/enhancer containing vector containing a selection marker such as DHFR for selection of stable clones. Finally, the CHO cells can be transfected (as described above) with the SV40 promoter/enhancer containing vector. Labeling may be performed, as described above, to verify expression. The culture medium containing the expressed poly-His tagged PRO can then be concentrated and purified by any selected method, such as by Ni²⁺-chelate affinity chromatography.

[0817] PRO may also be expressed in CHO and/or COS cells by a transient expression procedure or in CHO cells by another stable expression procedure.

[0818] Stable expression in CHO cells is performed using the following procedure. The proteins are expressed as an IgG construct (immunoadhesin), in which the coding sequences for the soluble forms (e.g. extracellular domains) of the respective proteins are fused to an IgG1 constant region sequence containing the hinge, CH2 and CH2 domains and/or is a poly-His tagged form.

[0819] Following PCR amplification, the respective DNAs are subcloned in a CHO expression vector using standard techniques as described in Ausubel et al., Current Protocols of Molecular Biology, Unit 3.16, John Wiley and Sons (1997). CHO expression vectors are constructed to have compatible restriction sites 5′ and 3′ of the DNA of interest to allow the convenient shuttling of cDNA's. The vector used expression in CHO cells is as described in Lucas et al., Nucl. Acids Res. 24:9 (1774-1779 (1996), and uses the SV40 early promoter/enhancer to drive expression of the cDNA of interest and dihydrofolate reductase (DHFR). DHFR expression permits selection for stable maintenance of the plasmid following transfection.

[0820] Twelve micrograms of the desired plasmid DNA is introduced into approximately 10 million CHO cells using commercially available transfection reagents Superfect® (Quiagen), Dosper® or Fugene® (Boehringer Mannheim). The cells are grown as described in Lucas et al., supra. Approximately 3×10⁻⁷ cells are frozen in an ampule for further growth and production as described below.

[0821] The ampules containing the plasmid DNA are thawed by placement into water bath and mixed by vortexing. The contents are pipetted into a centrifuge tube containing 10 mL of media and centrifuged at 1000 rpm for 5 minutes. The supernatant is aspirated and the cells are resuspended in 10 mL of selective media (0.2 μm filtered PS20 with 5% 0.2 μm diafiltered fetal bovine serum). The cells are then aliquoted into a 100 mL spinner containing 90 mL of selective media. After 1-2 days, the cells are transferred into a 250 mL spinner filled with 150 mL selective growth medium and incubated at 37° C. After another 2-3 days, 250 mL, 500 mL and 2000 mL spinners are seeded with 3×10⁵ cells/mL. The cell media is exchanged with fresh media by centrifugation and resuspension in production medium. Although any suitable CHO media may be employed, a production medium described in U.S. Pat. No. 5,122,469, issued Jun. 16, 1992 may actually be used. A 3L production spinner is seeded at 1.2×10⁶ cells/mL. On day 0, pH is determined. On day 1, the spinner is sampled and sparging with filtered air is commenced. On day 2, the spinner is sampled, the temperature shifted to 33° C., and 30 mL of 500 g/L glucose and 0.6 mL of 10% antifoam (e.g., 35% polydimethylsiloxane emulsion, Dow Corning 365 Medical Grade Emulsion) taken. Throughout the production, the pH is adjusted as necessary to keep it at around 7.2. After 10 days, or until the viability dropped below 70%, the cell culture is harvested by centrifugation and filtering through a 0.22 μm filter. The filtrate was either stored at 4° C. or immediately loaded onto columns for purification.

[0822] For the poly-His tagged constructs, the proteins are purified using a Ni-NTA column (Qiagen). Before purification, imidazole is added to the conditioned media to a concentration of 5 mM. The conditioned media is pumped onto a 6 ml Ni-NTA column equilibrated in 20 mM Hepes, pH 7.4, buffer containing 0.3 M NaCl and 5 mM imidazole at a flow rate of 4-5 ml/min. at 4° C. After loading, the column is washed with additional equilibration buffer and the protein eluted with equilibration buffer containing 0.25 M imidazole. The highly purified protein is subsequently desalted into a storage buffer containing 10 mM Hepes, 0.14 M NaCl and 4% mannitol, pH 6.8, with a 25 ml G25 Superfine (Pharmacia) column and stored at −80° C.

[0823] Immunoadhesin (Fc-containing) constructs are purified from the conditioned media as follows. The conditioned medium is pumped onto a 5 ml Protein A column (Pharmacia) which had been equilibrated in 20 mM Na phosphate buffer, pH 6.8. After loading, the column is washed extensively with equilibration buffer before elution with 100 mM citric acid, pH 3.5. The eluted protein is immediately neutralized by collecting 1 ml fractions into tubes containing 275 μl of 1 M Tris buffer, pH 9. The highly purified protein is subsequently desalted into storage buffer as described above for the poly-His tagged proteins. The homogeneity is assessed by SDS polyacrylamide gels and by N-terminal amino acid sequencing by Edman degradation.

[0824] Many of the PRO polypeptides disclosed herein were successfully expressed as described above.

### Example 5

### Expression of PRO in Yeast

[0825] The following method describes recombinant expression of PRO in yeast.

[0826] First, yeast expression vectors are constructed for intracellular production or secretion of PRO from the ADH2/GAPDH promoter. DNA encoding PRO and the promoter is inserted into suitable restriction enzyme sites in the selected plasmid to direct intracellular expression of PRO. For secretion, DNA encoding PRO can be cloned into the selected plasmid, together with DNA encoding the ADH2/GAPDH promoter, a native PRO signal peptide or other mammalian signal peptide, or, for example, a yeast alpha-factor or invertase secretory signal/leader sequence, and linker sequences (if needed) for expression of PRO.

[0827] Yeast cells, such as yeast strain AB110, can then be transformed with the expression plasmids described above and cultured in selected fermentation media. The transformed yeast supernatants can be analyzed by precipitation with 10% trichloroacetic acid and separation by SDS-PAGE, followed by staining of the gels with Coomassie Blue stain.

[0828] Recombinant PRO can subsequently be isolated and purified by removing the yeast cells from the fermentation medium by centrifugation and then concentrating the medium using selected cartridge filters. The concentrate containing PRO may further be purified using selected column chromatography resins.

[0829] Many of the PRO polypeptides disclosed herein were successfully expressed as described above.

### Example 6

### Expression of PRO in Baculovirus-Infected Insect Cells

[0830] The following method describes recombinant expression of PRO in Baculovirus-infected insect cells.

[0831] The sequence coding for PRO is fused upstream of an epitope tag contained within a baculovirus expression vector. Such epitope tags include poly-his tags and immunoglobulin tags (like Fc regions of IgG). A variety of plasmids may be employed, including plasmids derived from commercially available plasmids such as pVL1393 (Novagen). Briefly, the sequence encoding PRO or the desired portion of the coding sequence of PRO such as the sequence encoding the extracellular domain of a transmembrane protein or the sequence encoding the mature protein if the protein is extracellular is amplified by PCR with primers complementary to the 5′ and 3′ regions. The 5′ primer may incorporate flanking (selected) restriction enzyme sites. The product is then digested with those selected restriction enzymes and subcloned into the expression vector.

[0832] Recombinant baculovirus is generated by co-transfecting the above plasmid and BaculoGold™ virus DNA (Pharmingen) into Spodoptera frugiperda (“Sf9”) cells (ATCC CRL 1711) using lipofectin (commercially available from GIBCO-BRL). After 4-5 days of incubation at 28° C., the released viruses are harvested and used for further amplifications. Viral infection and protein expression are performed as described by O'Reilley et al., Baculovirus expression vectors: A Laboratory Manual, Oxford: Oxford University Press (1994).

[0833] Expressed poly-his tagged PRO can then be purified, for example, by Ni²⁺-chelate affinity chromatography as follows. Extracts are prepared from recombinant virus-infected Sf9 cells as described by Rupert et al., Nature, 362:175-179 (1993). Briefly, Sf9 cells are washed, resuspended in sonication buffer (25 mL Hepes, pH 7.9; 12.5 mM MgCl₂; 0.1 mM EDTA; 10% glycerol; 0.1% NP-40; 0.4 M KCl), and sonicated twice for 20 seconds on ice. The sonicates are cleared by centrifugation, and the supernatant is diluted 50-fold in loading buffer (50 mM phosphate, 300 mM NaCl, 10% glycerol, pH 7.8) and filtered through a 0.45 μm filter. A Ni²⁺-NTA agarose column (commercially available from Qiagen) is prepared with a bed volume of 5 mL, washed with 25 mL of water and equilibrated with 25 mL of loading buffer. The filtered cell extract is loaded onto the column at 0.5 mL per minute. The column is washed to baseline A₂₈₀ with loading buffer, at which point fraction collection is started. Next, the column is washed with a secondary wash buffer (50 mM phosphate; 300 mM NaCl, 10% glycerol, pH 6.0), which elutes nonspecifically bound protein. After reaching A₂₈₀ baseline again, the column is developed with a 0 to 500 mM Imidazole gradient in the secondary wash buffer. One mL fractions are collected and analyzed by SDS-PAGE and silver staining or Western blot with Ni²⁺-NTA-conjugated to alkaline phosphatase (Qiagen). Fractions containing the eluted His₁₀-tagged PRO are pooled and dialyzed against loading buffer.

[0834] Alternatively, purification of the IgG tagged (or Fc tagged) PRO can be performed using known chromatography techniques, including for instance, Protein A or protein G column chromatography.

[0835] Many of the PRO polypeptides disclosed herein were successfully expressed as described above.

### Example 7

### Preparation of Antibodies that Bind PRO

[0836] This example illustrates preparation of monoclonal antibodies which can specifically bind PRO.

[0837] Techniques for producing the monoclonal antibodies are known in the art and are described, for instance, in Goding, supra. Immunogens that may be employed include purified PRO, fusion proteins containing PRO, and cells expressing recombinant PRO on the cell surface. Selection of the immunogen can be made by the skilled artisan without undue experimentation.

[0838] Mice, such as Balb/c, are immunized with the PRO immunogen emulsified in complete Freund's adjuvant and injected subcutaneously or intraperitoneally in an amount from 1-100 micrograms. Alternatively, the immunogen is emulsified in MPL-TDM adjuvant (Ribi Immunochemical Research, Hamilton, Mont.) and injected into the animal's hind foot pads. The immunized mice are then boosted 10 to 12 days later with additional immunogen emulsified in the selected adjuvant. Thereafter, for several weeks, the mice may also be boosted with additional immunization injections. Serum samples may be periodically obtained from the mice by retro-orbital bleeding for testing in ELISA assays to detect anti-PRO antibodies.

[0839] After a suitable antibody titer has been detected, the animals “positive” for antibodies can be injected with a final intravenous injection of PRO. Three to four days later, the mice are sacrificed and the spleen cells are harvested. The spleen cells are then fused (using 35% polyethylene glycol) to a selected murine myeloma cell line such as P3X63AgU.1, available from ATCC, No. CRL 1597. The fusions generate hybridoma cells which can then be plated in 96 well tissue culture plates containing HAT (hypoxanthine, aminopterin, and thymidine) medium to inhibit proliferation of non-fused cells, myeloma hybrids, and spleen cell hybrids.

[0840] The hybridoma cells will be screened in an ELISA for reactivity against PRO. Determination of “positive” hybridoma cells secreting the desired monoclonal antibodies against PRO is within the skill in the art.

[0841] The positive hybridoma cells can be injected intraperitoneally into syngeneic Balb/c mice to produce ascites containing the anti-PRO monoclonal antibodies. Alternatively, the hybridoma cells can be grown in tissue culture flasks or roller bottles. Purification of the monoclonal antibodies produced in the ascites can be accomplished using ammonium sulfate precipitation, followed by gel exclusion chromatography. Alternatively, affinity chromatography based upon binding of antibody to protein A or protein G can be employed.

### Example 8

### Purification of PRO Polypeptides Using Specific Antibodies

[0842] Native or recombinant PRO polypeptides may be purified by a variety of standard techniques in the art of protein purification. For example, pro-PRO polypeptide, mature PRO polypeptide, or pre-PRO polypeptide is purified by immunoaffinity chromatography using antibodies specific for the PRO polypeptide of interest. In general, an immunoaffinity column is constructed by covalently coupling the anti-PRO polypeptide antibody to an activated chromatographic resin.

[0843] Polyclonal immunoglobulins are prepared from immune sera either by precipitation with ammonium sulfate or by purification on immobilized Protein A (Pharmacia LKB Biotechnology, Piscataway, N.J.). Likewise, monoclonal antibodies are prepared from mouse ascites fluid by ammonium sulfate precipitation or chromatography on immobilized Protein A. Partially purified immunoglobulin is covalently attached to a chromatographic resin such as CnBr-activated SEPHAROSE™ (Pharmacia LKB Biotechnology). The antibody is coupled to the resin, the resin is blocked, and the derivative resin is washed according to the manufacturer's instructions.

[0844] Such an immunoaffinity column is utilized in the purification of PRO polypeptide by preparing a fraction from cells containing PRO polypeptide in a soluble form. This preparation is derived by solubilization of the whole cell or of a subcellular fraction obtained via differential centrifugation by the addition of detergent or by other methods well known in the art. Alternatively, soluble PRO polypeptide containing a signal sequence may be secreted in useful quantity into the medium in which the cells are grown.

[0845] A soluble PRO polypeptide-containing preparation is passed over the immunoaffinity column, and the column is washed under conditions that allow the preferential absorbance of PRO polypeptide (e.g., high ionic strength buffers in the presence of detergent). Then, the column is eluted under conditions that disrupt antibody/PRO polypeptide binding (e.g., a low pH buffer such as approximately pH 2-3, or a high concentration of a chaotrope such as urea or thiocyanate ion), and PRO polypeptide is collected.

### Example 9

### Drug Screening

[0846] This invention is particularly useful for screening compounds by using PRO polypeptides or binding fragment thereof in any of a variety of drug screening techniques. The PRO polypeptide or fragment employed in such a test may either be free in solution, affixed to a solid support, borne on a cell surface, or located intracellularly. One method of drug screening utilizes eukaryotic or prokaryotic host cells which are stably transformed with recombinant nucleic acids expressing the PRO polypeptide or fragment. Drugs are screened against such transformed cells in competitive binding assays. Such cells, either in viable or fixed form, can be used for standard binding assays. One may measure, for example, the formation of complexes between PRO polypeptide or a fragment and the agent being tested. Alternatively, one can examine the diminution in complex formation between the PRO polypeptide and its target cell or target receptors caused by the agent being tested.

[0847] Thus, the present invention provides methods of screening for drugs or any other agents which can affect a PRO polypeptide-associated disease or disorder. These methods comprise contacting such an agent with an PRO polypeptide or fragment thereof and assaying (I) for the presence of a complex between the agent and the PRO polypeptide or fragment, or (ii) for the presence of a complex between the PRO polypeptide or fragment and the cell, by methods well known in the art. In such competitive binding assays, the PRO polypeptide or fragment is typically labeled. After suitable incubation, free PRO polypeptide or fragment is separated from that present in bound form, and the amount of free or uncomplexed label is a measure of the ability of the particular agent to bind to PRO polypeptide or to interfere with the PRO polypeptide/cell complex.

[0848] Another technique for drug screening provides high throughput screening for compounds having suitable binding affinity to a polypeptide and is described in detail in WO 84/03564, published on Sep. 13, 1984. Briefly stated, large numbers of different small peptide test compounds are synthesized on a solid substrate, such as plastic pins or some other surface. As applied to a PRO polypeptide, the peptide test compounds are reacted with PRO polypeptide and washed. Bound PRO polypeptide is detected by methods well known in the art. Purified PRO polypeptide can also be coated directly onto plates for use in the aforementioned drug screening techniques. In addition, non-neutralizing antibodies can be used to capture the peptide and immobilize it on the solid support.

[0849] This invention contemplates the use of competitive drug screening assays in which neutralizing antibodies capable of binding PRO polypeptide specifically compete with a test compound for binding to PRO polypeptide or fragments thereof. In this manner, the antibodies can be used to detect the presence of any peptide which shares one or more antigenic determinants with PRO polypeptide.

### Example 10

### Rational Drug Design

[0850] The goal of rational drug design is to produce structural analogs of biologically active polypeptide of interest (i.e., a PRO polypeptide) or of small molecules with which they interact, e.g., agonists, antagonists, or inhibitors. Any of these examples can be used to fashion drugs which are more active or stable forms of the PRO polypeptide or which enhance or interfere with the function of the PRO polypeptide in vivo (c.f., Hodgson, Bio/Technology, 9: 19-21 (1991)).

[0851] In one approach, the three-dimensional structure of the PRO polypeptide, or of a PRO polypeptide-inhibitor complex, is determined by x-ray crystallography, by computer modeling or, most typically, by a combination of the two approaches. Both the shape and charges of the PRO polypeptide must be ascertained to elucidate the structure and to determine active site(s) of the molecule. Less often, useful information regarding the structure of the PRO polypeptide may be gained by modeling based on the structure of homologous proteins. In both cases, relevant structural information is used to design analogous PRO polypeptide-like molecules or to identify efficient inhibitors. Useful examples of rational drug design may include molecules which have improved activity or stability as shown by Braxton and Wells, Biochemistry, 31:7796-7801 (1992) or which act as inhibitors, agonists, or antagonists of native peptides as shown by Athauda et al., J. Biochem., 113:742-746 (1993).

[0852] It is also possible to isolate a target-specific antibody, selected by functional assay, as described above, and then to solve its crystal structure. This approach, in principle, yields a pharmacore upon which subsequent drug design can be based. It is possible to bypass protein crystallography altogether by generating anti-idiotypic antibodies (anti-ids) to a functional, pharmacologically active antibody. As a mirror image of a mirror image, the binding site of the anti-ids would be expected to be an analog of the original receptor. The anti-id could then be used to identify and isolate peptides from banks of chemically or biologically produced peptides. The isolated peptides would then act as the pharmacore.

[0853] By virtue of the present invention, sufficient amounts of the PRO polypeptide may be made available to perform such analytical studies as X-ray crystallography. In addition, knowledge of the PRO polypeptide amino acid sequence provided herein will provide guidance to those employing computer modeling techniques in place of or in addition to x-ray crystallography.

[0854] The foregoing written specification is considered to be sufficient to enable one skilled in the art to practice the invention. The present invention is not to be limited in scope by the construct deposited, since the deposited embodiment is intended as a single illustration of certain aspects of the invention and any constructs that are functionally equivalent are within the scope of this invention. The deposit of material herein does not constitute an admission that the written description herein contained is inadequate to enable the practice of any aspect of the invention, including the best mode thereof, nor is it to be construed as limiting the scope of the claims to the specific illustrations that it represents. Indeed, various modifications of the invention in addition to those shown and described herein will become apparent to those skilled in the art from the foregoing description and fall within the scope of the appended claims.

1. Isolated nucleic acid having at least 80% nucleic acid sequence identity to:
a nucleotide sequence encoding the polypeptide shown in FIG. 3 (SEQ ID NO:3), FIG. 5 (SEQ ID NO:5), FIG. 7 (SEQ ID NO:7), FIG. 9 (SEQ ID NO:9), FIG. 11 (SEQ ID NO:11), FIG. 13 (SEQ ID NO:13), FIG. 15 (SEQ ID NO:15), FIG. 17 (SEQ ID NO:17), FIG. 19 (SEQ ID NO:19), FIG. 21 (SEQ ID NO:21), FIG. 23 (SEQ ID NO:23), FIG. 25 (SEQ ID NO:25), FIG. 27 (SEQ ID NO:27), FIG. 29 (SEQ ID NO:29), FIG. 31 (SEQ ID NO:31), FIG. 33 (SEQ ID NO:33), FIG. 35 (SEQ ID NO:35), FIG. 37 (SEQ ID NO:37), FIG. 39 (SEQ ID NO:39), FIG. 41 (SEQ ID. NO:41), FIG. 43 (SEQ ID NO:43), FIG. 45 (SEQ ID NO:45), FIG. 47 (SEQ ID NO:47), FIG. 49 (SEQ ID NO:49), FIG. 51 (SEQ ID NO:51), FIG. 53 (SEQ ID NO:53), FIG. 55 (SEQ ID NO:55), FIG. 57 (SEQ ID NO:57), FIG. 59 (SEQ ID NO:59), FIG. 61 (SEQ ID NO:61), FIG. 63 (SEQ ID NO:63), FIG. 65 (SEQ ID NO:65), FIG. 67 (SEQ ID NO:67), FIG. 69 (SEQ ID NO:69), FIG. 71 (SEQ ID NO:71), FIG. 73 (SEQ ID NO:73), FIG. 75 (SEQ ID NO:75), FIG. 77 (SEQ ID NO:77), FIG. 79 (SEQ ID NO:79), FIG. 81 (SEQ ID NO:81), FIG. 83 (SEQ ID NO:83), FIG. 85 (SEQ ID NO:85), FIG. 87 (SEQ ID NO:87), FIG. 89 (SEQ ID NO:89), FIG. 91 (SEQ ID NO:91), FIG. 93 (SEQ ID NO:93), FIG. 95 (SEQ ID NO:95), FIG. 97 (SEQ ID NO:97), FIG. 99 (SEQ ID NO:99), FIG. 101 (SEQ ID NO:101), FIG. 103 (SEQ ID NO:103), FIG. 105 (SEQ ID NO:105), FIG. 107 (SEQ ID NO:107), FIG. 109 (SEQ ID NO:109), FIG. 111 (SEQ ID NO:111), FIG. 113 (SEQ ID NO:113), FIG. 115 (SEQ ID NO:115), FIG. 117 (SEQ ID NO:117), FIG. 119 (SEQ ID NO:119), FIG. 121 (SEQ ID NO:121), FIG. 123 (SEQ ID NO:123), FIG. 125 (SEQ ID NO:125), FIG. 127 (SEQ ID NO:127), FIG. 129 (SEQ ID NO:129), FIG. 131 (SEQ ID NO:131), FIG. 133 (SEQ ID NO:133), FIG. 135 (SEQ ID NO:135), FIG. 137 (SEQ ID NO:137), FIG. 139 (SEQ ID NO:139), FIG. 141 (SEQ ID NO:141), FIG. 143 (SEQ ID NO:143), FIG. 145 (SEQ ID NO:145), FIG. 147 (SEQ ID NO:147), FIG. 149 (SEQ ID NO:149), FIG. 151 (SEQ ID NO:151), FIG. 153 (SEQ ID NO:153), FIG. 155 (SEQ ID NO:155), FIG. 157 (SEQ ID NO:157), FIG. 159 (SEQ ID NO:159), FIG. 161 (SEQ ID NO:161), FIG. 163 (SEQ ID NO:163), FIG. 165 (SEQ ID NO:165), FIG. 167 (SEQ ID NO:167), FIG. 169 (SEQ ID NO:169), FIG. 171 (SEQ ID NO:171), FIG. 173 (SEQ ID NO:173), FIG. 175 (SEQ ID NO:175), FIG. 177 (SEQ ID NO:177), FIG. 179 (SEQ ID NO:179), FIG. 181 (SEQ ID NO:181), FIG. 183 (SEQ ID NO:183), FIG. 185 (SEQ ID NO:185), FIG. 187 (SEQ ID NO:187), FIG. 189 (SEQ ID NO:189), FIG. 191 (SEQ ID NO:191), FIG. 193 (SEQ ID NO:193), FIG. 195 (SEQ ID NO:195), FIG. 197 (SEQ ID NO:197), FIG. 199 (SEQ ID NO:199), FIG. 201 (SEQ ID NO:201), FIG. 203 (SEQ ID NO:203), FIG. 205 (SEQ ID NO:205), FIG. 207 (SEQ ID NO:207), FIG. 209 (SEQ ID NO:209), FIG. 211 (SEQ ID NO:211), FIG. 213 (SEQ ID NO:213), FIG. 215 (SEQ ID NO:215, FIG. 217 (SEQ ID NO:217), FIG. 219 (SEQ ID NO:219), FIG. 221 (SEQ ID NO:221), FIG. 225 (SEQ ID NO:225), FIG. 227 (SEQ ID NO:227), FIG. 229 (SEQ ID NO:229), FIG. 232 (SEQ ID NO:232), FIG. 235 (SEQ ID NO:235), FIG. 237 (SEQ ID NO:237), FIG. 239 (SEQ ID NO:239), FIG. 243 (SEQ ID NO:243), FIG. 246 (SEQ ID NO:246), FIG. 248 (SEQ ID NO:248), FIG. 250 (SEQ ID NO:250), FIG. 252 (SEQ ID NO:252), FIG. 254 (SEQ ID NO:254), FIG. 256 (SEQ ID NO:256), FIG. 258 (SEQ ID NO:258), FIG. 260 (SEQ ID NO:260), FIG. 262 (SEQ ID NO:262), FIG. 264 (SEQ ID NO:264), FIG. 266 (SEQ ID NO:266), FIG. 268 (SEQ ID NO:268), FIG. 270 (SEQ ID NO:270), FIG. 272 (SEQ ID NO:272), FIG. 274 (SEQ ID NO:274), FIG. 276 (SEQ ID NO:276), FIG. 278 (SEQ ID NO:278), FIG. 280 (SEQ ID NO:280), FIG. 282 (SEQ ID NO:282), FIG. 284 (SEQ ID NO:284), FIG. 286 (SEQ ID NO:286), FIG. 288 (SEQ ID NO:288), FIG. 290 (SEQ ID NO:290), FIG. 292 (SEQ ID NO:292), FIG. 294 (SEQ ID NO:294), FIG. 296 (SEQ ID NO:296), FIG. 298 (SEQ ID NO:298), FIG. 300 (SEQ ID NO:300), FIG. 302 (SEQ ID NO:302), FIG. 304 (SEQ ID NO:304), FIG. 306 (SEQ ID NO:306), FIG. 308 (SEQ ID NO:308), FIG. 310 (SEQ ID NO:310), FIG. 312A-B (SEQ ID NO:312), FIG. 314 (SEQ ID NO:314), FIG. 316 (SEQ ID NO:316), FIG. 318 (SEQ ID NO:318), FIG. 320 (SEQ ID NO:320), FIG. 324 (SEQ ID NO:324), FIG. 326 (SEQ ID NO:326), FIG. 329 (SEQ ID NO:329), FIG. 332 (SEQ ID NO:332), FIG. 334 (SEQ ID NO:334), FIG. 336 (SEQ ID NO:336), FIG. 338 (SEQ ID NO:338), FIG. 340 (SEQ ID NO:340), FIG. 342 (SEQ ID NO:342), FIG. 344 (SEQ ID NO:344), FIG. 346 (SEQ ID NO:346), FIG. 348 (SEQ ID NO:348), FIG. 350 (SEQ ID NO:350), FIG. 352 (SEQ ID NO:352), FIG. 354 (SEQ ID NO:354), FIG. 356 (SEQ ID NO:356), FIG. 358 (SEQ ID NO:358), FIG. 360 (SEQ ID NO:360), FIG. 362 (SEQ ID NO:362), FIG. 364 (SEQ ID NO:364), FIG. 366 (SEQ ID NO:366), FIG. 368 (SEQ ID NO:368), FIG. 370 (SEQ ID NO:370), FIG. 372 (SEQ ID NO:372), FIG. 375 (SEQ ID NO:375), FIG. 377 (SEQ ID NO:377), FIG. 379 (SEQ ID NO:379), FIG. 381 (SEQ ID NO:381), FIG. 383 (SEQ ID NO:383), FIG. 385 (SEQ ID NO:385), FIG. 387 (SEQ ID NO:387), FIG. 389 (SEQ ID NO:389), FIG. 392 (SEQ ID NO:392), FIG. 394 (SEQ ID NO:394), FIG. 396 (SEQ ID NO:396), FIG. 399 (SEQ ID NO:399), FIG. 403 (SEQ ID NO:403), FIG. 405 (SEQ ID NO:405), FIG. 411 (SEQ ID NO:411), FIG. 413 (SEQ ID NO:413), FIG. 415 (SEQ ID NO:415), FIG. 417 (SEQ ID NO:417), FIG. 419 (SEQ ID NO:419), FIG. 421 (SEQ ID NO:421), FIG. 423 (SEQ ID NO:423), FIG. 425 (SEQ ID NO:425), FIG. 427 (SEQ ID NO:427), FIG. 429 (SEQ ID NO:429), FIG. 431 (SEQ ID NO:431), FIG. 433 (SEQ ID NO:433), FIG. 435 (SEQ ID NO:435), FIG. 437 (SEQ ID NO:437), FIG. 439 (SEQ ID NO:439), FIG. 441 (SEQ ID NO:441), FIG. 443 (SEQ ID NO:443), FIG. 445 (SEQ ID NO:445), FIG. 447 (SEQ ID NO:447), FIG. 449 (SEQ ID NO:449), FIG. 451 (SEQ ID NO:451), FIG. 453 (SEQ ID NO:453), FIG. 455 (SEQ ID NO:455), FIG. 457 (SEQ ID NO:457), FIG. 460 (SEQ ID NO:460), FIG. 462 (SEQ ID NO:462), FIG. 464 (SEQ ID NO:464), FIG. 466 (SEQ ID NO:466), FIG. 468 (SEQ ID NO:468), FIG. 472 (SEQ ID NO:472), FIG. 474 (SEQ ID NO:474), FIG. 476 (SEQ ID NO:476), FIG. 478 (SEQ ID NO:478), FIG. 480 (SEQ ID NO:480), FIG. 482 (SEQ ID NO:482), FIG. 484 (SEQ ID NO:484), FIG. 486 (SEQ ID NO:486), FIG. 488 (SEQ ID NO:488), FIG. 490 (SEQ ID NO:490), FIG. 492 (SEQ ID NO:492), FIG. 494 (SEQ ID NO:494), FIG. 496 (SEQ ID NO:496), FIG. 498 (SEQ ID NO:498), FIG. 500 (SEQ ID NO:500), FIG. 502 (SEQ ID NO:502), FIG. 504 (SEQ ID NO:504) or FIG. 506 (SEQ ID NO:506).

2. Isolated nucleic acid having at least 80% nucleic acid sequence identity to a nucleotide sequence selected from the group consisting of the nucleotide sequence shown in FIG. 1 (SEQ ID NO:1), FIG. 2A-B (SEQ ID NO:2), FIG. 4 (SEQ ID NO:4), FIG. 6 (SEQ ID NO:6), FIG. 8 (SEQ ID NO:8), FIG. 10 (SEQ ID NO:10), FIG. 12 (SEQ ID NO:12), FIG. 14 (SEQ ID NO:14), FIG. 16 (SEQ ID NO:16), FIG. 18 (SEQ ID NO:18), FIG. 20 (SEQ ID NO:20), FIG. 22 (SEQ ID NO:22), FIG. 24 (SEQ ID NO:24), FIG. 26 (SEQ ID NO:26), FIG. 28 (SEQ ID NO:28), FIG. 30 (SEQ ID NO:30), FIG. 32 (SEQ ID NO:32), FIG. 34 (SEQ ID NO:34), FIG. 36A-B (SEQ ID NO:36), FIG. 38 (SEQ ID NO:38), FIG. 40 (SEQ ID NO:40), FIG. 42 (SEQ ID NO:42), FIG. 44A-B (SEQ ID NO:44), FIG. 46A-B (SEQ ID NO:46), FIG. 48 (SEQ ID NO:48), FIG. 50A-B (SEQ ID NO:50), FIG. 52 (SEQ ID NO:52), FIG. 54 (SEQ ID NO:54), FIG. 56 (SEQ ID NO:56), FIG. 58 (SEQ ID NO:58), FIG. 60 (SEQ ID NO:60), FIG. 62 (SEQ ID NO:62), FIG. 64 (SEQ ID NO:64), FIG. 66 (SEQ ID NO:66), FIG. 68 (SEQ ID NO:68), FIG. 70 (SEQ ID NO:70), FIG. 72A-B (SEQ ID NO:72), FIG. 74 (SEQ ID NO:74), FIG. 76 (SEQ ID NO:76), FIG. 78 (SEQ ID NO:78), FIG. 80 (SEQ ID NO:80), FIG. 82 (SEQ ID NO:82), FIG. 84 (SEQ ID NO:84), FIG. 86 (SEQ ID NO:86), FIG. 88 (SEQ ID NO:88), FIG. 90 (SEQ ID NO:90), FIG. 92 (SEQ ID NO:92), FIG. 94A-B (SEQ ID NO:94), FIG. 96 (SEQ ID NO:96), FIG. 98 (SEQ ID NO:98), FIG. 100 (SEQ ID NO:100), FIG. 102 (SEQ ID NO:102), FIG. 104 (SEQ ID NO:104), FIG. 106 (SEQ ID NO:106), FIG. 108 (SEQ ID NO:108), FIG. 10A-B (SEQ ID NO:110), FIG. 112 (SEQ ID NO:112), FIG. 114A-B (SEQ ID NO:114), FIG. 116 (SEQ ID NO:116), FIG. 118 (SEQ ID NO:118), FIG. 120 (SEQ ID NO:120), FIG. 122A-B (SEQ ID NO:122), FIG. 124A-B (SEQ ID NO:124), FIG. 126 (SEQ ID NO:126), FIG. 128A-B (SEQ ID NO:128), FIG. 130 (SEQ ID NO:130), FIG. 132 (SEQ ID NO:132), FIG. 134 (SEQ ID NO:134), FIG. 136 (SEQ ID NO:136), FIG. 138 (SEQ ID NO:138), FIG. 140 (SEQ ID NO:140), FIG. 142 (SEQ ID NO:142), FIG. 144A-B (SEQ ID NO:144), FIG. 146 (SEQ ID NO:146), FIG. 148 (SEQ ID NO:148), FIG. 150 (SEQ ID NO:150), FIG. 152 (SEQ ID NO:152), FIG. 154 (SEQ ID NO:154), FIG. 156A-B (SEQ ID NO:156), FIG. 158 (SEQ ID NO:158), FIG. 160 (SEQ ID NO:160), FIG. 162 (SEQ ID NO:162), FIG. 164 (SEQ ID NO:164), FIG. 166A-B (SEQ ID NO:166), FIG. 168A-B (SEQ ID NO:168), FIG. 170 (SEQ ID NO:170), FIG. 172 (SEQ ID NO:172), FIG. 174A-B (SEQ ID NO:174), FIG. 176 (SEQ ID NO:176), FIG. 178A-B (SEQ ID NO:178), FIG. 180 (SEQ ID NO:180), FIG. 182 (SEQ ID NO:182), FIG. 184 (SEQ ID NO:184), FIG. 186 (SEQ ID NO:186), FIG. 188 (SEQ ID NO:188), FIG. 190A-B (SEQ ID NO:190), FIG. 192A-B (SEQ ID NO:192), FIG. 194 (SEQ ID NO:194), FIG. 196 (SEQ ID NO:196), FIG. 198 (SEQ ID NO:198), FIG. 200A-B (SEQ ID NO:200), FIG. 202 (SEQ ID NO:202), FIG. 204 (SEQ ID NO:204), FIG. 206 (SEQ ID NO:206), FIG. 208 (SEQ ID NO:208), FIG. 210 (SEQ ID NO:210), FIG. 212 (SEQ ID NO:212), FIG. 214 (SEQ ID NO:214), FIG. 216A-B (SEQ ID NO:216), FIG. 218 (SEQ ID NO:218), FIG. 220A-B (SEQ ID NO:220), FIG. 222 (SEQ ID NO:222), FIG. 223 (SEQ ID NO:223), FIG. 224 (SEQ ID NO:224), FIG. 226 (SEQ ID NO:226), FIG. 228 (SEQ ID NO:228), FIG. 230 (SEQ ID NO:230), FIG. 231 (SEQ ID NO:231), FIG. 233 (SEQ ID NO:233), FIG. 234 (SEQ ID NO:234), FIG. 236A-B (SEQ ID NO:236), FIG. 238 (SEQ ID NO:238), FIG. 240 (SEQ ID NO:240), FIG. 241 (SEQ ID NO:241), FIG. 242 (SEQ ID NO:242), FIG. 244 (SEQ ID NO:244), FIG. 245 (SEQ ID NO:245), FIG. 247A-B (SEQ ID NO:247), FIG. 249 (SEQ ID NO:249), FIG. 251 (SEQ ID NO:251), FIG. 253 (SEQ ID NO:253), FIG. 255 (SEQ ID NO:255), FIG. 257 (SEQ ID NO:257), FIG. 259 (SEQ ID NO:259), FIG. 261 (SEQ ID NO:261), FIG. 263 (SEQ ID NO:263), FIG. 265 (SEQ ID NO:265), FIG. 267 (SEQ ID NO:267), FIG. 269 (SEQ ID NO:269), FIG. 271 (SEQ ID NO:271), FIG. 273 (SEQ ID NO:273), FIG. 275 (SEQ ID NO:275), FIG. 277 (SEQ ID NO:277), FIG. 279 (SEQ ID NO:279), FIG. 281 (SEQ ID NO:281), FIG. 283 (SEQ ID NO:283), FIG. 285 (SEQ ID NO:285), FIG. 287 (SEQ ID NO:287), FIG. 289A-B (SEQ ID NO:289), FIG. 291 (SEQ ID NO:291), FIG. 293A-B (SEQ ID NO:293), FIG. 295 (SEQ ID NO:295), FIG. 297 (SEQ ID NO:297), FIG. 299A-B (SEQ ID NO:299), FIG. 301 (SEQ ID NO:301), FIG. 303A-B (SEQ ID NO:303), FIG. 305A-B (SEQ ID NO:305), FIG. 307 (SEQ ID NO:307), FIG. 309 (SEQ ID NO:309), FIG. 311A-D (SEQ ID NO:311), FIG. 313 (SEQ ID NO:313), FIG. 315A-B (SEQ ID NO:315), FIG. 317 (SEQ ID NO:317), FIG. 319A-B (SEQ ID NO:319), FIG. 321 (SEQ ID NO:321), FIG. 322 (SEQ ID NO:322), FIG. 323 (SEQ ID NO:323), FIG. 325 (SEQ ID NO:325), FIG. 327 (SEQ ID NO:327), FIG. 328 (SEQ ID NO:328), FIG. 330 (SEQ ID NO:330), FIG. 331 (SEQ ID NO:331), FIG. 333 (SEQ ID NO:333), FIG. 335A-B (SEQ ID NO:335), FIG. 337 (SEQ ID NO:337), FIG. 339 (SEQ ID NO:339), FIG. 341 (SEQ ID NO:341), FIG. 343 (SEQ ID NO:343), FIG. 345 (SEQ ID NO:345), FIG. 347 (SEQ ID NO:347), FIG. 349 (SEQ ID NO:349), FIG. 351 (SEQ ID NO:351), FIG. 353 (SEQ ID NO:353), FIG. 355 (SEQ ID NO:355), FIG. 357 (SEQ ID NO:357), FIG. 359 (SEQ ID NO:359), FIG. 361A-B (SEQ ID NO:361), FIG. 363 (SEQ ID NO:363), FIG. 365 (SEQ ID NO:365), FIG. 367A-C (SEQ ID NO:367), FIG. 369 (SEQ ID NO:369), FIG. 371 (SEQ ID NO:371), FIG. 373A-B (SEQ ID NO:373), FIG. 374 (SEQ ID NO:374), FIG. 376 (SEQ ID NO:376), FIG. 378 (SEQ ID NO:378), FIG. 380 (SEQ ID NO:380), FIG. 382 (SEQ ID NO:382), FIG. 384A-B (SEQ ID NO:384), FIG. 386 (SEQ ID NO:386), FIG. 388 (SEQ ID NO:388), FIG. 390 (SEQ ID NO:390), FIG. 391 (SEQ ID NO:391), FIG. 393 (SEQ ID NO:393), FIG. 395A-B (SEQ ID NO:395), FIG. 397 (SEQ ID NO:397), FIG. 398A-B (SEQ ID NO:398), FIG. 400 (SEQ ID NO:400), FIG. 401 (SEQ ID NO:401), FIG. 402A-B (SEQ ID NO:402), FIG. 404 (SEQ ID NO:404), FIG. 406 (SEQ ID NO:406), FIG. 407 (SEQ ID NO:407), FIG. 408 (SEQ ID NO:408), FIG. 409 (SEQ ID NO:409), FIG. 410 (SEQ ID NO:410), FIG. 412 (SEQ ID NO:412), FIG. 414 (SEQ ID NO:414), FIG. 416 (SEQ ID NO:416), FIG. 418 (SEQ ID NO:418), FIG. 420A-B (SEQ ID NO:420), FIG. 422 (SEQ ID NO:422), FIG. 424A-B (SEQ ID NO:424), FIG. 426 (SEQ ID NO:426), FIG. 428 (SEQ ID NO:428), FIG. 430 (SEQ ID NO:430), FIG. 432 (SEQ ID NO:432), FIG. 434 (SEQ ID NO:434), FIG. 436A-B (SEQ ID NO:436), FIG. 438A-B (SEQ ID NO:438), FIG. 440A-B (SEQ ID NO:440), FIG. 442A-B (SEQ ID NO:442), FIG. 444A-B (SEQ ID NO:444), FIG. 446A-B (SEQ ID NO:446), FIG. 448 (SEQ ID NO:448), FIG. 450A-B (SEQ ID NO:450), FIG. 452 (SEQ ID NO:452), FIG. 454 (SEQ ID NO:454), FIG. 456 (SEQ ID NO:456), FIG. 458 (SEQ ID NO:458), FIG. 459 (SEQ ID NO:459), FIG. 461 (SEQ ID NO:461), FIG. 463A-B (SEQ ID NO:463), FIG. 465 (SEQ ID NO:465), FIG. 467 (SEQ ID NO:467), FIG. 469A-B (SEQ ID NO:469), FIG. 470A-B (SEQ ID NO:470), FIG. 471A-C (SEQ ID NO:471), FIG. 473 (SEQ ID NO:473), FIG. 475 (SEQ ID NO:475), FIG. 477 (SEQ ID NO:477), FIG. 479 (SEQ ID NO:479), FIG. 481A-B (SEQ ID NO:481), FIG. 483 (SEQ ID NO:483), FIG. 485 (SEQ ID NO:485), FIG. 487 (SEQ ID NO:487), FIG. 489 (SEQ ID NO:489), FIG. 491A-B (SEQ ID NO:491), FIG. 493 (SEQ ID NO:493), FIG. 495 (SEQ ID NO:495), FIG. 497 (SEQ ID NO:497), FIG. 499 (SEQ ID NO:499), FIG. 501 (SEQ ID NO:501), FIG. 503 (SEQ ID NO:503) and FIG. 505 (SEQ ID NO:505)

3. Isolated nucleic acid having at least 80% nucleic acid sequence identity to a nucleotide sequence selected from the group consisting of the full-length coding sequence of the nucleotide sequence shown in FIG. 1 (SEQ ID NO:1), FIG. 2A-B (SEQ ID NO:2), FIG. 4 (SEQ ID NO:4), FIG. 6 (SEQ ID NO:6), FIG. 8 (SEQ ID NO:8), FIG. 10 (SEQ ID NO:10), FIG. 12 (SEQ ID NO:12), FIG. 14 (SEQ ID NO:14), FIG. 16 (SEQ ID NO:16), FIG. 18 (SEQ ID NO:18), FIG. 20 (SEQ ID NO:20), FIG. 22 (SEQ ID NO:22), FIG. 24 (SEQ ID NO:24), FIG. 26 (SEQ ID NO:26), FIG. 28 (SEQ ID NO:28), FIG. 30 (SEQ ID NO:30), FIG. 32 (SEQ ID NO:32), FIG. 34 (SEQ ID NO:34), FIG. 36A-B (SEQ ID NO:36), FIG. 38 (SEQ ID NO:38), FIG. 40 (SEQ ID NO:40), FIG. 42 (SEQ ID NO:42), FIG. 44A-B (SEQ ID NO:44), FIG. 46A-B (SEQ ID NO:46), FIG. 48 (SEQ ID NO:48), FIG. 50A-B (SEQ ID NO:50), FIG. 52 (SEQ ID NO:52), FIG. 54 (SEQ ID NO:54), FIG. 56 (SEQ ID NO:56), FIG. 58 (SEQ ID NO:58), FIG. 60 (SEQ ID NO:60), FIG. 62 (SEQ ID NO:62), FIG. 64 (SEQ ID NO:64), FIG. 66 (SEQ ID NO:66), FIG. 68 (SEQ ID NO:68), FIG. 70 (SEQ ID NO:70), FIG. 72A-B (SEQ ID NO:72), FIG. 74 (SEQ ID NO:74), FIG. 76 (SEQ ID NO:76), FIG. 78 (SEQ ID NO:78), FIG. 80 (SEQ ID NO:80), FIG. 82 (SEQ ID NO:82), FIG. 84 (SEQ ID NO:84), FIG. 86 (SEQ ID NO:86), FIG. 88 (SEQ ID NO:88), FIG. 90 (SEQ ID NO:90), FIG. 92 (SEQ ID NO:92), FIG. 94A-B (SEQ ID NO:94), FIG. 96 (SEQ ID NO:96), FIG. 98 (SEQ ID NO:98), FIG. 100 (SEQ ID NO:100), FIG. 102 (SEQ ID NO:102), FIG. 104 (SEQ ID NO:104), FIG. 106 (SEQ ID NO:106), FIG. 108 (SEQ ID NO:108), FIG. 110A-B (SEQ ID NO:110), FIG. 112 (SEQ ID NO:112), FIG. 114 A-B (SEQ ID NO:114), FIG. 116 (SEQ ID NO:116), FIG. 118 (SEQ ID NO:118), FIG. 120 (SEQ ID NO:120), FIG. 122A-B (SEQ ID NO:122), FIG. 124A-B (SEQ ID NO:124), FIG. 126 (SEQ ID NO:126), FIG. 128A-B (SEQ ID NO:128), FIG. 130 (SEQ ID NO:130), FIG. 132 (SEQ ID NO:132), FIG. 134 (SEQ ID NO:134), FIG. 136 (SEQ ID NO:136), FIG. 138 (SEQ ID NO:138), FIG. 140 (SEQ ID NO:140), FIG. 142 (SEQ ID NO:142), FIG. 144A-B (SEQ ID NO:144), FIG. 146 (SEQ ID NO:146), FIG. 148 (SEQ ID NO:148), FIG. 150 (SEQ ID NO:150), FIG. 152 (SEQ ID NO:152), FIG. 154 (SEQ ID NO:1.54), FIG. 156A-B (SEQ ID NO:156), FIG. 158 (SEQ ID NO:158), FIG. 160 (SEQ ID NO:160), FIG. 162 (SEQ ID NO:162), FIG. 164 (SEQ ID NO:164), FIG. 166A-B (SEQ ID NO:166), FIG. 168A-B (SEQ ID NO:168), FIG. 170 (SEQ ID NO:170), FIG. 172 (SEQ ID NO:172), FIG. 174A-B (SEQ ID NO:174), FIG. 176 (SEQ ID NO:176), FIG. 178A-B (SEQ ID NO:178), FIG. 180 (SEQ ID NO:180), FIG. 182 (SEQ ID NO:182), FIG. 184 (SEQ ID NO:184), FIG. 186 (SEQ ID NO:186), FIG. 188 (SEQ ID NO:188), FIG. 190A-B (SEQ ID NO:190), FIG. 192A-B (SEQ ID NO:192), FIG. 194 (SEQ ID NO:194), FIG. 196 (SEQ ID NO:196), FIG. 198 (SEQ ID NO:198), FIG. 200A-B (SEQ ID NO:200), FIG. 202 (SEQ ID NO:202), FIG. 204 (SEQ ID NO:204), FIG. 206 (SEQ ID NO:206), FIG. 208 (SEQ ID NO:208), FIG. 210 (SEQ ID NO:210), FIG. 212 (SEQ ID NO:212), FIG. 214 (SEQ ID NO:214), FIG. 216A-B (SEQ ID NO:216), FIG. 218 (SEQ ID NO:218), FIG. 220A-B (SEQ ID NO:220), FIG. 222 (SEQ ID NO:222), FIG. 223 (SEQ ID NO:223), FIG. 224 (SEQ ID NO:224), FIG. 226 (SEQ ID NO: 226), FIG. 228 (SEQ ID NO:228), FIG. 230 (SEQ ID NO:230), FIG. 231 (SEQ ID NO:231), FIG. 233 (SEQ ID NO:233), FIG. 234 (SEQ ID NO:234), FIG. 236A-B (SEQ ID NO:236), FIG. 238 (SEQ ID NO:238), FIG. 240 (SEQ ID NO:240), FIG. 241 (SEQ ID NO:241), FIG. 242 (SEQ ID NO:242), FIG. 244 (SEQ ID NO:244), FIG. 245 (SEQ ID NO:245), FIG. 247A-B (SEQ ID NO:247), FIG. 249 (SEQ ID NO:249), FIG. 251 (SEQ ID NO:251), FIG. 253 (SEQ ID NO:253), FIG. 255 (SEQ ID NO:255), FIG. 257 (SEQ ID NO:257), FIG. 259 (SEQ ID NO:259), FIG. 261 (SEQ ID NO:261), FIG. 263 (SEQ ID NO:263), FIG. 265 (SEQ ID NO:265), FIG. 267 (SEQ ID NO:267), FIG. 269 (SEQ ID NO:269), FIG. 271 (SEQ ID NO:271), FIG. 273 (SEQ ID NO:273), FIG. 275 (SEQ ID NO:275), FIG. 277 (SEQ ID NO:277), FIG. 279 (SEQ ID NO:279), FIG. 281 (SEQ ID NO:281), FIG. 283 (SEQ ID NO:283), FIG. 285 (SEQ ID NO:285), FIG. 287 (SEQ ID NO:287), FIG. 289A-B (SEQ ID NO:289), FIG. 291 (SEQ ID NO:291), FIG. 293A-B (SEQ ID NO:293), FIG. 295 (SEQ ID NO:295), FIG. 297 (SEQ ID NO:297), FIG. 299A-B (SEQ ID NO:299), FIG. 301 (SEQ ID NO:301), FIG. 303A-B (SEQ ID NO:303), FIG. 305A-B (SEQ ID NO:305), FIG. 307 (SEQ ID NO:307), FIG. 309 (SEQ ID NO:309), FIG. 311A-D (SEQ ID NO:311), FIG. 313 (SEQ ID NO:313), FIG. 315A-B (SEQ ID NO:315), FIG. 317 (SEQ ID NO:317), FIG. 319A-B (SEQ ID NO:319), FIG. 321 (SEQ ID NO:321), FIG. 322 (SEQ ID NO:322), FIG. 323 (SEQ ID NO:323), FIG. 325 (SEQ ID NO:325), FIG. 327 (SEQ ID NO:327), FIG. 328 (SEQ ID NO:328), FIG. 330 (SEQ ID NO:330), FIG. 331 (SEQ ID NO:331), FIG. 333 (SEQ ID NO:333), FIG. 335A-B (SEQ ID NO:335), FIG. 337 (SEQ ID NO:337), FIG. 339 (SEQ ID NO:339), FIG. 341 (SEQ ID NO:341), FIG. 343 (SEQ ID NO:343), FIG. 345 (SEQ ID NO:345), FIG. 347 (SEQ ID NO:347), FIG. 349 (SEQ ID NO:349), FIG. 351 (SEQ ID NO:351), FIG. 353 (SEQ ID NO:353), FIG. 355 (SEQ ID NO:355), FIG. 357 (SEQ ID NO:357), FIG. 359 (SEQ ID NO:359), FIG. 361A-B (SEQ ID NO:361), FIG. 363 (SEQ ID NO:363), FIG. 365 (SEQ ID NO:365), FIG. 367A-C (SEQ ID NO:367), FIG. 369 (SEQ ID NO:369), FIG. 371 (SEQ ID NO:371), FIG. 373A-B (SEQ ID NO:373), FIG. 374 (SEQ ID NO:374), FIG. 376 (SEQ ID NO:376), FIG. 378 (SEQ ID NO:378), FIG. 380 (SEQ ID NO:380), FIG. 382 (SEQ ID NO:382), FIG. 384A-B (SEQ ID NO:384), FIG. 386 (SEQ ID NO:386), FIG. 388 (SEQ ID NO:388), FIG. 390 (SEQ ID NO:390), FIG. 391 (SEQ ID NO:391), FIG. 393 (SEQ ID NO:393), FIG. 395A-B (SEQ ID NO:395), FIG. 397 (SEQ ID NO:397), FIG. 398A-B (SEQ ID NO:398), FIG. 400 (SEQ ID NO:400), FIG. 401 (SEQ ID NO:401), FIG. 402A-B (SEQ ID NO:402), FIG. 404 (SEQ ID NO:404), FIG. 406 (SEQ ID NO:406), FIG. 407 (SEQ ID NO:407), FIG. 408 (SEQ ID NO:408), FIG. 409 (SEQ ID NO:409), FIG. 410 (SEQ ID NO:410), FIG. 412 (SEQ ID NO:412), FIG. 414 (SEQ ID NO:414), FIG. 416 (SEQ ID NO:416), FIG. 418 (SEQ ID NO:418), FIG. 420A-B (SEQ ID NO:420), FIG. 422 (SEQ ID NO:422), FIG. 424A-B (SEQ ID NO:424), FIG. 426 (SEQ ID NO:426), FIG. 428 (SEQ ID NO:428), FIG. 430 (SEQ ID NO:430), FIG. 432 (SEQ ID NO:432), FIG. 434 (SEQ ID NO:434), FIG. 436A-B (SEQ ID NO:436), FIG. 438A-B (SEQ ID NO:438), FIG. 440A-B (SEQ ID NO:440), FIG. 442A-B (SEQ ID NO:442), FIG. 444A-B (SEQ ID NO:444), FIG. 446A-B (SEQ ID NO:446), FIG. 448 (SEQ ID NO:448), FIG. 450A-B (SEQ ID NO:450), FIG. 452 (SEQ ID NO:452), FIG. 454 (SEQ ID NO:454), FIG. 456 (SEQ ID NO:456), FIG. 458 (SEQ ID NO:458), FIG. 459 (SEQ ID NO:459), FIG. 461 (SEQ ID NO:461), FIG. 463A-B (SEQ ID NO:463), FIG. 465 (SEQ ID NO:465), FIG. 467 (SEQ ID NO:467), FIG. 469A-B (SEQ ID NO:469), FIG. 470A-B (SEQ ID NO:470), FIG. 471A-C (SEQ ID NO:471), FIG. 473 (SEQ ID NO:473), FIG. 475 (SEQ ID NO:475), FIG. 477 (SEQ ID NO:477), FIG. 479 (SEQ ID NO:479), FIG. 481A-B (SEQ ID NO:481), FIG. 483 (SEQ ID NO:483), FIG. 485 (SEQ ID NO:485), FIG. 487 (SEQ ID NO:487), FIG. 489 (SEQ ID NO:489), FIG. 491A-B (SEQ ID NO:491), FIG. 493 (SEQ ID NO:493), FIG. 495 (SEQ ID NO:495), FIG. 497 (SEQ ID NO:497), FIG. 499 (SEQ ID NO:499), FIG. 501 (SEQ ID NO:501), FIG. 503 (SEQ ID NO:503) and FIG. 505 (SEQ ID NO:505).

4. A vector comprising the nucleic acid of claim 1.

5. The vector of claim 4 operably linked to control sequences recognized by a host cell transformed with the vector.

6. A host cell comprising the vector of claim 5.

7. The host cell of claim 6, wherein said cell is a CHO cell, an E. coli cell or a yeast cell.

8. A process for producing a PRO polypeptide comprising culturing the host cell of claim 7 under conditions suitable for expression of said PRO polypeptide and recovering said PRO polypeptide from the cell culture.

9. An isolated polypeptide having at least 80% amino acid sequence identity to:
(a) an amino acid sequence of the polypeptide shown FIG. 3 (SEQ ID NO:3), FIG. 5 (SEQ ID NO:5), FIG. 7 (SEQ ID NO:7), FIG. 9 (SEQ ID NO:9), FIG. 11 (SEQ ID NO:11), FIG. 13 (SEQ ID. NO:13), FIG. 15 (SEQ ID NO:15), FIG. 17 (SEQ ID NO:17), FIG. 19 (SEQ ID NO:19), FIG. 21 (SEQ ID NO:21), FIG. 23 (SEQ ID NO:23), FIG. 25 (SEQ ID NO:25), FIG. 27 (SEQ ID NO:27), FIG. 29 (SEQ ID NO:29), FIG. 31 (SEQ ID NO:31), FIG. 33 (SEQ ID NO:33), FIG. 35 (SEQ ID NO:35), FIG. 37 (SEQ ID NO:37), FIG. 39 (SEQ ID. NO:39), FIG. 41 (SEQ ID NO:41), FIG. 43 (SEQ ID NO:43), FIG. 45 (SEQ ID NO:45), FIG. 47 (SEQ ID NO:47), FIG. 49 (SEQ ID NO:49), FIG. 51 (SEQ ID NO:51), FIG. 53 (SEQ ID NO:53), FIG. 55 (SEQ ID NO:55), FIG. 57 (SEQ ID NO:57), FIG. 59 (SEQ ID NO:59), FIG. 61 (SEQ ID NO:61), FIG. 63 (SEQ ID NO:63), FIG. 65 (SEQ ID NO:65), FIG. 67 (SEQ ID NO:67), FIG. 69 (SEQ ID NO:69), FIG. 71 (SEQ ID NO:71), FIG. 73 (SEQ ID NO:73), FIG. 75 (SEQ ID NO:75), FIG. 77 (SEQ ID NO:77), FIG. 79 (SEQ ID NO:79), FIG. 81 (SEQ ID NO:81), FIG. 83 (SEQ ID NO:83), FIG. 85 (SEQ ID NO:85), FIG. 87 (SEQ ID NO:87), FIG. 89 (SEQ ID NO:89), FIG. 91 (SEQ ID NO:91), FIG. 93 (SEQ ID NO:93), FIG. 95 (SEQ ID NO:95), FIG. 97 (SEQ ID NO:97), FIG. 99 (SEQ ID NO:99), FIG. 101 (SEQ ID NO:101), FIG. 103 (SEQ ID NO:103), FIG. 105 (SEQ ID NO:105), FIG. 107 (SEQ ID NO:107), FIG. 109 (SEQ ID NO:109), FIG. 111 (SEQ ID NO:111), FIG. 113 (SEQ ID NO:113), FIG. 115 (SEQ ID NO:115), FIG. 117 (SEQ ID NO:117), FIG. 119 (SEQ ID NO:119), FIG. 121 (SEQ ID NO:121), FIG. 123 (SEQ ID NO:123), FIG. 125 (SEQ ID NO:125), FIG. 127 (SEQ ID NO:127), FIG. 129 (SEQ ID NO:129), FIG. 131 (SEQ ID NO:131), FIG. 133 (SEQ ID NO:133), FIG. 135 (SEQ ID NO:135), FIG. 137 (SEQ ID NO:137), FIG. 139 (SEQ ID NO:139), FIG. 141 (SEQ ID NO:141), FIG. 143 (SEQ ID NO:143), FIG. 145 (SEQ ID NO:145), FIG. 147 (SEQ ID NO:147), FIG. 149 (SEQ ID NO:149), FIG. 151 (SEQ ID NO:151), FIG. 153 (SEQ ID NO:153), FIG. 155 (SEQ ID NO:155), FIG. 157 (SEQ ID NO:157), FIG. 159 (SEQ ID NO:159), FIG. 161 (SEQ ID NO:161), FIG. 163 (SEQ ID NO:163), FIG. 165 (SEQ ID NO:165), FIG. 167 (SEQ ID NO:167), FIG. 169 (SEQ ID NO:169), FIG. 171 (SEQ ID NO:171), FIG. 173 (SEQ ID NO:173), FIG. 175 (SEQ ID NO:175), FIG. 177 (SEQ ID NO:177), FIG. 179 (SEQ ID NO:179), FIG. 181 (SEQ ID NO:181), FIG. 183 (SEQ ID NO:183), FIG. 185 (SEQ ID NO:185), FIG. 187 (SEQ ID NO:187), FIG. 189 (SEQ ID NO:189), FIG. 191 (SEQ ID NO:191), FIG. 193 (SEQ ID NO:193), FIG. 195 (SEQ ID NO:195), FIG. 197 (SEQ ID NO:197), FIG. 199 (SEQ ID NO:199), FIG. 201 (SEQ ID NO:201), FIG. 203 (SEQ ID NO:203), FIG. 205 (SEQ ID NO:205), FIG. 207 (SEQ ID NO:207), FIG. 209 (SEQ ID NO:209), FIG. 211 (SEQ ID NO:211), FIG. 213 (SEQ ID NO:213), FIG. 215 (SEQ ID NO:215, FIG. 217 (SEQ ID NO:217), FIG. 219 (SEQ ID NO:219), FIG. 221 (SEQ ID NO:221), FIG. 225 (SEQ ID NO:225), FIG. 227 (SEQ ID NO:227), FIG. 229 (SEQ ID NO:229), FIG. 232 (SEQ ID NO:232), FIG. 235 (SEQ ID NO:235), FIG. 237 (SEQ ID NO:237), FIG. 239 (SEQ ID NO:239), FIG. 243 (SEQ ID NO:243), FIG. 246 (SEQ ID NO:246), FIG. 248 (SEQ ID NO:248), FIG. 250 (SEQ ID NO:250), FIG. 252 (SEQ ID NO:252), FIG. 254 (SEQ ID NO:254), FIG. 256 (SEQ ID NO:256), FIG. 258 (SEQ ID NO:258), FIG. 260 (SEQ ID NO:260), FIG. 262 (SEQ ID NO:262), FIG. 264 (SEQ ID NO:264), FIG. 266 (SEQ ID NO:266), FIG. 268 (SEQ ID NO:268), FIG. 270 (SEQ ID NO:270), FIG. 272 (SEQ ID NO:272), FIG. 274 (SEQ ID NO:274), FIG. 276 (SEQ ID NO:276), FIG. 278 (SEQ ID NO:278), FIG. 280 (SEQ ID NO:280), FIG. 282 (SEQ ID NO:282), FIG. 284 (SEQ ID NO:284), FIG. 286 (SEQ ID NO:286), FIG. 288 (SEQ ID NO:288), FIG. 290 (SEQ ID NO:290), FIG. 292 (SEQ ID NO:292), FIG. 294 (SEQ ID NO:294), FIG. 296 (SEQ ID NO:296), FIG. 298 (SEQ ID NO:298), FIG. 300 (SEQ ID NO:300), FIG. 302 (SEQ ID NO:302), FIG. 304 (SEQ ID NO:304), FIG. 306 (SEQ ID NO:306), FIG. 308 (SEQ ID NO:308), FIG. 310 (SEQ ID NO:310), FIG. 312A-B (SEQ ID NO:312), FIG. 314 (SEQ ID NO:314), FIG. 316 (SEQ ID NO:316), FIG. 318 (SEQ ID NO:318), FIG. 320 (SEQ ID NO:320), FIG. 324 (SEQ ID NO:324), FIG. 326 (SEQ ID NO:326), FIG. 329 (SEQ ID NO:329), FIG. 332 (SEQ ID NO:332), FIG. 334 (SEQ ID NO:334), FIG. 336 (SEQ ID NO:336), FIG. 338 (SEQ ID NO:338), FIG. 340 (SEQ ID NO:340), FIG. 342 (SEQ ID NO:342), FIG. 344 (SEQ ID NO:344), FIG. 346 (SEQ ID NO:346), FIG. 348 (SEQ ID NO:348), FIG. 350 (SEQ ID NO:350), FIG. 352 (SEQ ID NO:352), FIG. 354 (SEQ ID NO:354), FIG. 356 (SEQ ID NO:356), FIG. 358 (SEQ ID NO:358), FIG. 360 (SEQ ID NO:360), FIG. 362 (SEQ ID NO:362), FIG. 364 (SEQ ID NO-364), FIG. 366 (SEQ ID NO:366), FIG. 368 (SEQ ID NO:368), FIG. 370 (SEQ ID NO:370), FIG. 372 (SEQ ID NO:372), FIG. 375 (SEQ ID NO:375), FIG. 377 (SEQ ID NO:377), FIG. 379 (SEQ ID NO:379), FIG. 381 (SEQ ID NO:381), FIG. 383 (SEQ ID NO:383), FIG. 385 (SEQ ID NO:385), FIG. 387 (SEQ ID NO:387), FIG. 389 (SEQ ID NO:389), FIG. 392 (SEQ ID NO:392), FIG. 394 (SEQ ID NO:394), FIG. 396 (SEQ ID NO:396), FIG. 399 (SEQ ID NO:399), FIG. 403 (SEQ ID NO:403), FIG. 405 (SEQ ID NO:405), FIG. 411 (SEQ ID NO:411), FIG. 413 (SEQ ID NO:413), FIG. 415 (SEQ ID NO:415), FIG. 417 (SEQ ID NO:417), FIG. 419 (SEQ ID NO:419), FIG. 421 (SEQ ID NO:421), FIG. 423 (SEQ ID NO:423), FIG. 425 (SEQ ID NO:425), FIG. 427 (SEQ ID NO:427), FIG. 429 (SEQ ID NO:429), FIG. 431 (SEQ ID NO:431), FIG. 433 (SEQ ID NO:433), FIG. 435 (SEQ ID NO:435), FIG. 437 (SEQ ID NO:437), FIG. 439 (SEQ ID NO:439), FIG. 441 (SEQ ID NO:441), FIG. 443 (SEQ ID NO:443), FIG. 445 (SEQ ID NO:445), FIG. 447 (SEQ ID NO:447), FIG. 449 (SEQ ID NO:449), FIG. 451 (SEQ ID NO:451), FIG. 453 (SEQ ID NO:453), FIG. 455 (SEQ ID NO:455), FIG. 457 (SEQ ID NO:457), FIG. 460 (SEQ ID NO:460), FIG. 462 (SEQ ID NO:462), FIG. 464 (SEQ ID NO:464), FIG. 466 (SEQ ID NO:466), FIG. 468 (SEQ ID NO:468), FIG. 472 (SEQ ID NO:472), FIG. 474 (SEQ ID NO:474), FIG. 476 (SEQ ID NO:476), FIG. 478 (SEQ ID NO:478), FIG. 480 (SEQ ID NO:480), FIG. 482 (SEQ ID NO:482), FIG. 484 (SEQ ID NO:484), FIG. 486 (SEQ ID NO:486), FIG. 488 (SEQ ID NO:488), FIG. 490 (SEQ ID NO:490), FIG. 492 (SEQ ID NO:492), FIG. 494 (SEQ ID NO:494), FIG. 496 (SEQ ID NO:496), FIG. 498 (SEQ ID NO:498), FIG. 500 (SEQ ID NO:500), FIG. 502 (SEQ ID NO:502), FIG. 504 (SEQ ID NO:504) or FIG. 506 (SEQ ID NO:506).

10. A chimeric molecule comprising a polypeptide according to claim 9 fused to a heterologous amino acid sequence.

11. The chimeric molecule of claim 10, wherein said heterologous amino acid sequence is an epitope tag sequence or an Fc region of an immunoglobulin.

12. An antibody which specifically binds to a polypeptide according to claim 9.

13. The antibody of claim 12, wherein said antibody is a monoclonal antibody, a humanized antibody or a single-chain antibody.

14. A composition of matter comprising (a) a polypeptide of claim 9, (b) an agonist of said polypeptide, (c) an antagonist of said polypeptide, or (d) an antibody that binds to said polypeptide, in combination with a carrier.

15. The composition of matter of claim 14, wherein said carrier is a pharmaceutically acceptable carrier.

16. The composition of matter of claim 15 comprising a therapeutically effective amount of (a), (b), (c) or (d).

17. An article of manufacture, comprising:
a container;
a label on said container; and
a composition of matter comprising (a) a polypeptide of claim 9, (b) an agonist of said polypeptide, (c) an antagonist of said polypeptide, or (d) an antibody that binds to said polypeptide, contained within said container, wherein label on said container indicates that said composition of matter can be used for treating an immune related disease.

18. A method of treating a B cell related disorder in a mammal in need thereof comprising administering to said mammal a therapeutically effective amount of (a) a polypeptide of claim 9, (b) an agonist of said polypeptide, (c) an antagonist of said polypeptide, or (d) an antibody that binds to said polypeptide.

19. The method of claim 18, wherein the immune related disorder is; systemic lupus erythematosis, X-linked infantile hypogammaglobulinemia, polysaccaride antigen unresponsiveness, selective IgA deficiency, selective IgM deficiency, selective deficiency of IgG subclasses, immunodeficiency with hyper Ig-M, transient hypogammaglobulinemia of infancy, Burkitt's lymphoma, Intermediate lymphoma, follicular lymphoma, typeII hypersensitivity, rheumatoid arthritis, autoimmune mediated hemolytic anemia, myesthenia gravis, hypoadrenocorticism, glomerulonephritis and ankylosing spondylitis.

20. A method for determining the presence of a PRO polypeptide in a sample suspected of containing said polypeptide, said method comprising exposing said sample to an anti-PRO12560, anti-PRO329, anti-PRO71236, anti-PRO1265, anti-PRO71045, anti-PRO71049, anti-PRO37162, anti-PRO160, anti-PRO37534, anti-PRO37544, anti-PRO21787, anti-PRO34330, anti-PRO2540, anti-PRO7, anti-PRO34288, anti-PRO84690, anti-PRO2134, anti-PRO21928, anti-PRO23974, anti-PRO34457, anti-PRO37158, anti-PRO2537, anti-PRO36827, anti-PRO26296, anti-PRO36766, anti-PRO4912, anti-PRO4769, anti-PRO36899, anti-PRO33667, anti-PRO37695, anti-PRO38069, anti-PRO21716, anti-PRO36124, anti-PRO 77694, anti-PRO37957, anti-PRO25114, anti-PRO37553, anti-PRO81979, anti-PRO6013, anti-PRO21960, anti-PRO34276, anti-PRO1717, anti-PRO34107, anti-PRO12612, anti-PRO37946, anti-PRO12865, anti-PRO37029, anti-PRO38337, anti-PRO4710, anti-PRO12570, anti-PRO12890, anti-PRO37121, anti-PRO3813, anti-PRO24934, anti-PRO12458, anti-PRO37843, anti-PRO37547, anti-PRO36300, anti-PRO37192, anti-PRO12832, anti-PRO25147, anti-PRO12876, anti-PRO12155, anti-PRO12370, anti-PRO12320, anti-PRO23370, anti-PRO25266, anti-PRO4785, anti-PRO 4660, anti-PRO71095, anti-PRO4658, anti-PRO2757, anti-PRO12789, anti-PRO20128, anti-PRO2834, anti-PRO9998, anti-PRO84691, anti-PRO12904, anti-PRO4887, anti-PRO12082, anti-PRO37975, anti-PRO37653, anti-PRO4776, anti-PRO12073, anti-PRO38457, anti-PRO4767, anti-PRO12884, anti-PRO12586, anti-PRO84692, anti-PRO12280, anti-PRO23859, anti-PRO2577, anti-PRO37696, anti-PRO 24075, anti-PRO71042, anti-PRO37639, anti-PRO84693, anti-PRO37272, anti-PRO 84694, anti-PRO4330, anti-PRO84695, anti-PRO285, anti-PRO38310, anti-PRO37657, anti-PRO71061, anti-PRO209, anti-PRO37584, anti-PRO84696, anti-PRO4860, anti-PRO38492, anti-PRO11738, anti-PRO69476, anti-PRO12032, anti-PRO69484, anti-PRO23460, anti-PRO84476, anti-PRO84697, anti-PRO71207, anti-PRO28714, anti-PRO84698, anti-PRO49839, anti-PRO84441, anti-PRO49214, anti-PRO50523, anti-PRO50241, anti-PRO83773, anti-PRO84699, anti-PRO50772, anti-PRO49326, anti-PRO49824, anti-PRO70333, anti-PRO83673, anti-PRO50332, anti-PRO51295, anti-PRO51621, anti-PRO34958, anti-PRO50821, anti-PRO84700, anti-PRO84701, anti-PRO60333, anti-PRO50187, anti-PRO48357, anti-PRO50365, anti-PRO84702, anti-PRO49810, anti-PRO58710, anti-PRO69503, anti-PRO49564, anti-PRO84703, anti-PRO84663, anti-PRO83800, anti-PRO84704, anti-PRO84705, anti-PRO84706, anti-PRO57996, anti-PRO84368, anti-PRO84496, anti-PRO84707, anti-PRO49765, anti-PRO23253, anti-PRO84709, anti-PRO82352, anti-PRO82903, anti-PRO83260, anti-PRO83681, anti-PRO69487, anti-PRO83148, anti-PRO58958, anti-PRO58399, anti-PRO80649, anti-PRO58425, anti-PRO84376, anti-PRO84309, anti-PRO59142, anti-PRO58810, anti-PRO84710, anti-PRO80648, anti-PRO84711, anti-PRO84712, anti-PRO82872, anti-PRO84714, anti-PRO84183, anti-PRO83879, anti-PRO84715, anti-PRO84716, anti-PRO84717, anti-PRO71206, anti-PRO51950, anti-PRO71035, anti-PRO52268, anti-PRO52040, anti-PRO71288, anti-PRO69458, anti-PRO69903, anti-PRO52672, anti-PRO52174, anti-PRO71289, anti-PRO58230, anti-PRO71238, anti-PRO84718, anti-PRO69632, anti-PRO4913, anti-PRO84265, anti-PRO84719, anti-PRO57922, anti-PRO12613, anti-PRO62312, anti-PRO60891, anti-PRO84720, anti-PRO84721, anti-PRO84722, anti-PRO4854, anti-PRO59611, anti-PRO60271, anti-PRO63074, anti-PRO84723, anti-PRO84724, anti-PRO35972, anti-PRO84434, anti-PRO59476, anti-PRO84725, anti-PRO84726, anti-PRO84727, anti-PRO84728, anti-PRO84729, anti-PRO84730, anti-PRO84731, anti-PRO21326, anti-PRO69478, anti-PRO80846, anti-PRO84611, anti-PRO61948, anti-PRO84732, anti-PRO84733, anti-PRO59776, anti-PRO84734, anti-PRO83839, anti-PRO69472, anti-PRO23253, anti-PRO84735 or anti-PRO37583 antibody and determining binding of said antibody to a component of said sample.

21. A method of diagnosing a B cell related disease in a mammal, said method comprising detecting the level of expression of a gene encoding PRO12560, PRO329, PRO71236, PRO1265, PRO71045, PRO71049, PRO37162, PRO160, PRO37534, PRO37544, PRO21787, PRO34330, PRO2540, PRO7, PRO34288, PRO84690, PRO2134, PRO21928, PRO23974, PRO34457, PRO37158, PRO2537, PRO36827, PRO26296, PRO36766, PRO4912, PRO4769, PRO36899, PRO33667, PRO37695, PRO38069, PRO21716, PRO36124, PRO77694, PRO37957, PRO25114, PRO37553, PRO81979, PRO6013, PRO21960, PRO34276, PRO1717, PRO34107, PRO12612, PRO37946, PRO12865, PRO37029, PRO38337, PRO4710, PRO12570, PRO12890, PRO37121, PRO3813, PRO24934, PRO12458, PRO37843, PRO37547, PRO36300, PRO37192, PRO12832, PRO25147, PRO12876, PRO12155, PRO12370, PRO12320, PRO23370, PRO25266, PRO4785, PRO4660, PRO71095, PRO4658, PRO2757, PRO12789, PRO20128, PRO2834, PRO9998, PRO84691, PRO12904, PRO4887, PRO12082, PRO37975, PRO37653, PRO4776, PRO12073, PRO38457, PRO4767, PRO12884, PRO12586, PRO84692, PRO12280, PRO23859, PRO2577, PRO37696, PRO24075, PRO71042, PRO37639, PRO84693, PRO37272, PRO84694, PRO4330, PRO84695, PRO285, PRO38310, PRO37657, PRO71061, PRO209, PRO37584, PRO84696, PRO4860, PRO38492, PRO11738, PRO69476, PRO12032, PRO69484, PRO23460, PRO84476, PRO84697, PRO71207, PRO28714, PRO84698, PRO49839, PRO84441, PRO49214, PRO50523, PRO50241, PRO83773, PRO84699, PRO50772, PRO49326, PRO49824, PRO70333, PRO83673, PRO50332, PRO51295, PRO51621, PRO34958, PRO50821, PRO84700, PRO84701, PRO60333, PRO50187, PRO48357, PRO50365, PRO84702, PRO49810, PRO58710, PRO69503, PRO49564, PRO84703, PRO84663, PRO83800, PRO84704, PRO84705, PRO84706, PRO57996, PRO84368, PRO84496, PRO84707, PRO49765, PRO23253, PRO84709, PRO82352, PRO82903, PRO83260, PRO83681, PRO69487, PRO83148, PRO58958, PRO58399, PRO80649, PRO58425, PRO84376, PRO84309, PRO59142, PRO58810, PRO84710, PRO80648, PRO84711, PRO84712, PRO82872, PRO84714, PRO84183, PRO83879, PRO84715, PRO84716, PRO84717, PRO71206, PRO51950, PRO71035, PRO52268, PRO52040, PRO71288, PRO69458, PRO69903, PRO52672, PRO52174, PRO71289, PRO58230, PRO71238, PRO84718, PRO69632, PRO4913, PRO84265, PRO84719, PRO57922, PRO12613, PRO62312, PRO60891, PRO84720, PRO84721, PRO84722, PRO4854, PRO59611, PRO60271, PRO63074, PRO84723, PRO84724, PRO35972, PRO84434, PRO59476, PRO84725, PRO84726, PRO84727, PRO84728, PRO84729, PRO84730, PRO84731, PRO21326, PRO69478, PRO80846, PRO84611, PRO61948, PRO84732, PRO84733, PRO59776, PRO84734, PRO83839, PRO69472, PRO23253, PRO84735 or PRO37583 polypeptide (a) in a test sample of tissue cells obtained from the mammal, and (b) in a control sample of known normal tissue cells of the same cell type, wherein a higher or lower level of expression of said gene in the test sample as compared to the control sample is indicative of the presence of B cell related disease in the mammal from which the test tissue cells were obtained.

22. A method of diagnosing a B cell related disease in a mammal, said method comprising (a) contacting an anti-PRO12560, anti-PRO329, anti-PRO71236, anti-PRO1265, anti-PRO71045, anti-PRO71049, anti-PRO37162, anti-PRO160, anti-PRO37534, anti-PRO37544, anti-PRO21787, anti-PRO34330, anti-PRO2540, anti-PRO7, anti-PRO34288, anti-PRO84690, anti-PRO2134, anti-PRO21928, anti-PRO23974, anti-PRO34457, anti-PRO37158, anti-PRO2537, anti-PRO36827, anti-PRO26296, anti-PRO36766, anti-PRO4912, anti-PRO4769, anti-PRO36899, anti-PRO33667, anti-PRO37695, anti-PRO38069, anti-PRO21716, anti-PRO36124, anti-PRO77694, anti-PRO37957, anti-PRO25114, anti-PRO37553, anti-PRO81979, anti-PRO6013, anti-PRO21960, anti-PRO34276, anti-PRO1717, anti-PRO34107, anti-PRO12612, anti-PRO37946, anti-PRO12865, anti-PRO37029, anti-PRO38337, anti-PRO4710, anti-PRO12570, anti-PRO12890, anti-PRO37121, anti-PRO3813, anti-PRO24934, anti-PRO12458, anti-PRO37843, anti-PRO37547, anti-PRO36300, anti-PRO37192, anti-PRO12832, anti-PRO25147, anti-PRO12876, anti-PRO12155, anti-PRO12370, anti-PRO12320, anti-PRO23370, anti-PRO25266, anti-PRO4785, anti-PRO4660, anti-PRO71095, anti-PRO4658, anti-PRO2757, anti-PRO12789, anti-PRO20128, anti-PRO2834, anti-PRO9998, anti-PRO84691, anti-PRO12904, anti-PRO4887, anti-PRO12082, anti-PRO37975, anti-PRO37653, anti-PRO4776, anti-PRO12073, anti-PRO38457, anti-PRO4767, anti-PRO12884, anti-PRO12586, anti-PRO84692, anti-PRO12280, anti-PRO23859, anti-PRO2577, anti-PRO37696, anti-PRO24075, anti-PRO71042, anti-PRO37639, anti-PRO84693, anti-PRO37272, anti-PRO84694, anti-PRO4330, anti-PRO84695, anti-PRO285, anti-PRO38310, anti-PRO37657, anti-PRO71061, anti-PRO209, anti-PRO37584, anti-PRO84696, anti-PRO4860, anti-PRO38492, anti-PRO11738, anti-PRO69476, anti-PRO12032, anti-PRO69484, anti-PRO23460, anti-PRO84476, anti-PRO84697, anti-PRO71207, anti-PRO28714, anti-PRO84698, anti-PRO49839, anti-PRO84441, anti-PRO49214, anti-PRO50523, anti-PRO50241, anti-PRO83773, anti-PRO84699, anti-PRO50772, anti-PRO49326, anti-PRO49824, anti-PRO70333, anti-PRO83673, anti-PRO50332, anti-PRO51295, anti-PRO51621, anti-PRO34958, anti-PRO50821, anti-PRO84700, anti-PRO84701, anti-PRO60333, anti-PRO50187, anti-PRO48357, anti-PRO50365, anti-PRO84702, anti-PRO49810, anti-PRO58710, anti-PRO69503, anti-PRO49564, anti-PRO84703, anti-PRO84663, anti-PRO83800, anti-PRO84704, anti-PRO84705, anti-PRO84706, anti-PRO57996, anti-PRO84368, anti-PRO84496, anti-PRO84707, anti-PRO49765, anti-PRO23253, anti-PRO84709, anti-PRO82352, anti-PRO82903, anti-PRO83260, anti-PRO83681, anti-PRO69487, anti-PRO83148, anti-PRO58958, anti-PRO58399, anti-PRO80649, anti-PRO58425, anti-PRO84376, anti-PRO84309, anti-PRO59142, anti-PRO58810, anti-PRO84710, anti-PRO80648, anti-PRO84711, anti-PRO84712, anti-PRO82872, anti-PRO84714, anti-PRO84183, anti-PRO83879, anti-PRO84715, anti-PRO84716, anti-PRO84717, anti-PRO71206, anti-PRO51950, anti-PRO71035, anti-PRO52268, anti-PRO52040, anti-PRO71288, anti-PRO69458, anti-PRO69903, anti-PRO52672, anti-PRO52174, anti-PRO71289, anti-PRO58230, anti-PRO71238, anti-PRO84718, anti-PRO69632, anti-PRO4913, anti-PRO84265, anti-PRO84719, anti-PRO57922, anti-PRO12613, anti-PRO62312, anti-PRO60891, anti-PRO84720, anti-PRO84721, anti-PRO84722, anti-PRO4854, anti-PRO59611, anti-PRO60271, anti-PRO63074, anti-PRO84723, anti-PRO84724, anti-PRO35972, anti-PRO84434, anti-PRO59476, anti-PRO84725, anti-PRO84726, anti-PRO84727, anti-PRO84728, anti-PRO84729, anti-PRO84730, anti-PRO84731, anti-PRO21326, anti-PRO69478, anti-PRO80846, anti-PRO84611, anti-PRO61948, anti-PRO84732, anti-PRO84733, anti-PRO59776, anti-PRO84734, anti-PRO83839, anti-PRO69472, anti-PRO23253, anti-PRO84735 or anti-PRO37583 antibody with a test sample of tissue cells obtained from said mammal and (b) detecting the formation of a complex between the antibody and the polypeptide in the test sample, wherein formation of said complex is indicative of the presence of an immune related disease in the mammal from which the test tissue cells were obtained.

23. A method of identifying a compound that inhibits the activity of PRO12560, PRO329, PRO71236, PRO1265, PRO71045, PRO71049, PRO37162, PRO160, PRO37534, PRO37544, PRO21787, PRO34330, PRO2540, PRO7, PRO34288, PRO84690, PRO2134, PRO21928, PRO23974, PRO34457, PRO37158, PRO2537, PRO36827, PRO26296, PRO36766, PRO4912, PRO4769, PRO36899, PRO33667, PRO37695, PRO38069, PRO21716, PRO36124, PRO77694, PRO37957, PRO25114, PRO37553, PRO81979, PRO6013, PRO21960, PRO34276, PRO1717, PRO34107, PRO12612, PRO37946, PRO12865, PRO37029, PRO38337, PRO4710, PRO12570, PRO12890, PRO37121, PRO3813, PRO24934, PRO12458, PRO37843, PRO37547, PRO36300, PRO37192, PRO12832, PRO25147, PRO12876, PRO12155, PRO12370, PRO12320, PRO23370, PRO25266, PRO4785, PRO4660, PRO71095, PRO4658, PRO2757, PRO12789, PRO20128, PRO2834, PRO9998, PRO84691, PRO12904, PRO4887, PRO12082, PRO37975, PRO37653, PRO4776, PRO12073, PRO38457, PRO4767, PRO12884, PRO12586, PRO84692, PRO12280, PRO23859, PRO2577, PRO37696, PRO24075, PRO71042, PRO37639, PRO84693, PRO37272, PRO84694, PRO4330, PRO84695, PRO285, PRO38310, PRO37657, PRO71061, PRO209, PRO37584, PRO84696, PRO4860, PRO38492, PRO11738, PRO69476, PRO12032, PRO69484, PRO23460, PRO84476, PRO84697, PRO71207, PRO28714, PRO84698, PRO49839, PRO84441, PRO49214, PRO50523, PRO50241, PRO83773, PRO84699, PRO50772, PRO49326, PRO49824, PRO70333, PRO83673, PRO50332, PRO51295, PRO51621, PRO34958, PRO50821, PRO84700, PRO84701, PRO60333, PRO50187, PRO48357, PRO50365, PRO84702, PRO49810, PRO58710, PRO69503, PRO49564, PRO84703, PRO84663, PRO83800, PRO84704, PRO84705, PRO84706, PRO57996, PRO84368, PRO84496, PRO84707, PRO49765, PRO23253, PRO84709, PRO82352, PRO82903, PRO83260, PRO83681, PRO69487, PRO83148, PRO58958, PRO58399, PRO80649, PRO58425, PRO84376, PRO84309, PRO59142, PRO58810, PRO84710, PRO80648, PRO84711, PRO84712, PRO82872, PRO84714, PRO84183, PRO83879, PRO84715, PRO84716, PRO84717, PRO71206, PRO51950, PRO71035, PRO52268, PRO52040, PRO71288, PRO69458, PRO69903, PRO52672, PRO52174, PRO71289, PRO58230, PRO71238, PRO84718, PRO69632, PRO4913, PRO84265, PRO84719, PRO57922, PRO12613, PRO62312, PRO60891, PRO84720, PRO84721, PRO84722, PRO4854, PRO59611, PRO60271, PRO63074, PRO84723, PRO84724, PRO35972, PRO84434, PRO59476, PRO84725, PRO84726, PRO84727, PRO84728, PRO84729, PRO84730, PRO84731, PRO21326, PRO69478, PRO80846, PRO84611, PRO61948, PRO84732, PRO84733, PRO59776, PRO84734, PRO83839, PRO69472, PRO23253, PRO84735 or PRO37583 polypeptide, said method comprising contacting cells which normally respond to said polypeptide with (a) said polypeptide and (b) a candidate compound, and determining the lack responsiveness by said cell to (a).

24. A method of identifying a compound that inhibits the expression of a gene encoding a PRO12560, PRO329, PRO71236, PRO1265, PRO71045, PRO71049, PRO37162, PRO160, PRO37534, PRO37544, PRO21787, PRO34330, PRO2540, PRO7, PRO34288, PRO84690, PRO2134, PRO21928, PRO23974, PRO34457, PRO37158, PRO2537, PRO36827, PRO26296, PRO36766, PRO4912, PRO4769, PRO36899, PRO33667, PRO37695, PRO38069, PRO21716, PRO36124, PRO77694, PRO37957, PRO25114, PRO37553, PRO81979, PRO6013, PRO21960, PRO34276, PRO1717, PRO34107, PRO12612, PRO37946, PRO12865, PRO37029, PRO38337, PRO4710, PRO12570, PRO12890, PRO37121, PRO3813, PRO24934, PRO12458, PRO37843, PRO37547, PRO36300, PRO37192, PRO12832, PRO25147, PRO12876, PRO12155, PRO12370, PRO12320, PRO23370, PRO25266, PRO4785, PRO4660, PRO71095, PRO4658, PRO2757, PRO12789, PRO20128, PRO2834, PRO9998, PRO84691, PRO12904, PRO4887, PRO12082, PRO37975, PRO37653, PRO4776, PRO12073, PRO38457, PRO4767, PRO12884, PRO12586, PRO84692, PRO12280, PRO23859, PRO2577, PRO37696, PRO24075, PRO71042, PRO37639, PRO84693, PRO37272, PRO84694, PRO4330, PRO84695, PRO285, PRO38310, PRO37657, PRO71061, PRO209, PRO37584, PRO84696, PRO4860, PRO38492, PRO11738, PRO69476, PRO12032, PRO69484, PRO23460, PRO84476, PRO84697, PRO71207, PRO28714, PRO84698, PRO49839, PRO84441, PRO49214, PRO50523, PRO50241, PRO83773, PRO84699, PRO50772, PRO49326, PRO49824, PRO70333, PRO83673, PRO50332, PRO51295, PRO51621, PRO34958, PRO50821, PRO84700, PRO84701, PRO60333, PRO50187, PRO48357, PRO50365, PRO84702, PRO49810, PRO58710, PRO69503, PRO49564, PRO84703, PRO84663, PRO83800, PRO84704, PRO84705, PRO84706, PRO57996, PRO84368, PRO84496, PRO84707, PRO49765, PRO23253, PRO84709, PRO82352, PRO82903, PRO83260, PRO83681, PRO69487, PRO83148, PRO58958, PRO58399, PRO80649, PRO58425, PRO84376, PRO84309, PRO59142, PRO58810, PRO84710, PRO80648, PRO84711, PRO84712, PRO82872, PRO84714, PRO84183, PRO83879, PRO84715, PRO84716, PRO84717, PRO71206, PRO51950, PRO71035, PRO52268, PRO52040, PRO71288, PRO69458, PRO69903, PRO52672, PRO52174, PRO71289, PRO58230, PRO71238, PRO84718, PRO69632, PRO4913; PRO84265, PRO84719, PRO57922, PRO12613, PRO62312, PRO60891, PRO84720, PRO84721, PRO84722, PRO4854, PRO59611, PRO60271, PRO63074, PRO84723, PRO84724, PRO35972, PRO84434, PRO59476, PRO84725, PRO84726, PRO84727, PRO84728, PRO84729, PRO84730, PRO84731, PRO21326, PRO69478, PRO80846, PRO84611, PRO61948, PRO84732, PRO84733, PRO59776, PRO84734, PRO83839, PRO69472, PRO23253, PRO84735 or PRO37583 polypeptide, said method comprising contacting cells which normally express said polypeptide with a candidate compound, and determining the lack of expression said gene.

25. The method of claim 24, wherein said candidate compound is an antisense nucleic acid.

26. A method of identifying a compound that mimics the activity of a PRO12560, PRO329, PRO71236, PRO1265, PRO71045, PRO71049, PRO37162, PRO160, PRO37534, PRO37544, PRO21787, PRO34330, PRO2540, PRO7, PRO34288, PRO84690, PRO2134, PRO21928, PRO23974, PRO34457, PRO37158, PRO2537, PRO36827, PRO26296, PRO36766, PRO4912, PRO4769, PRO36899, PRO33667, PRO37695, PRO38069, PRO21716, PRO36124, PRO77694, PRO37957, PRO25114, PRO37553, PRO81979, PRO6013, PRO21960, PRO34276, PRO1717, PRO34107, PRO12612, PRO37946, PRO12865, PRO37029, PRO38337, PRO4710, PRO12570, PRO12890, PRO37121, PRO3813, PRO24934, PRO12458, PRO37843, PRO37547, PRO36300, PRO37192, PRO12832, PRO25147, PRO12876, PRO12155, PRO12370, PRO12320, PRO23370, PRO25266, PRO4785, PRO4660, PRO71095, PRO4658, PRO2757, PRO12789, PRO20128, PRO2834, PRO9998, PRO84691, PRO12904, PRO4887, PRO12082, PRO37975, PRO37653, PRO4776, PRO12073, PRO38457, PRO4767, PRO12884, PRO12586, PRO84692, PRO12280, PRO23859, PRO2577, PRO37696, PRO24075, PRO71042, PRO37639, PRO84693, PRO37272, PRO84694, PRO4330, PRO84695, PRO285, PRO38310, PRO37657, PRO71061, PRO209, PRO37584, PRO84696, PRO4860, PRO38492, PRO11738, PRO69476, PRO12032, PRO69484, PRO23460, PRO84476, PRO84697, PRO71207, PRO28714, PRO84698, PRO49839, PRO84441, PRO49214, PRO50523, PRO50241, PRO83773, PRO84699, PRO50772, PRO49326, PRO49824, PRO70333, PRO83673, PRO50332, PRO51295, PRO51621, PRO34958, PRO50821, PRO84700, PRO84701, PRO60333, PRO50187, PRO48357, PRO50365, PRO84702, PRO49810, PRO58710, PRO69503, PRO49564, PRO84703, PRO84663, PRO83800, PRO84704, PRO84705, PRO84706, PRO57996, PRO84368, PRO84496, PRO84707, PRO49765, PRO23253, PRO84709, PRO82352, PRO82903, PRO83260, PRO83681, PRO69487, PRO83148, PRO58958, PRO58399, PRO80649, PRO58425, PRO84376, PRO84309, PRO59142, PRO58810, PRO84710, PRO80648, PRO84711, PRO84712, PRO82872, PRO84714, PRO84183, PRO83879, PRO84715, PRO84716, PRO84717, PRO71206, PRO51950, PRO71035, PRO52268, PRO52040, PRO71288, PRO69458, PRO69903, PRO52672, PRO52174, PRO71289, PRO58230, PRO71238, PRO84718, PRO69632, PRO4913, PRO84265, PRO84719, PRO57922, PRO12613, PRO62312, PRO60891, PRO84720, PRO84721, PRO84722, PRO4854, PRO59611, PRO60271, PRO63074, PRO84723, PRO84724, PRO35972, PRO84434, PRO59476, PRO84725, PRO84726, PRO84727, PRO84728, PRO84729, PRO84730, PRO84731, PRO21326, PRO69478, PRO80846, PRO84611, PRO61948, PRO84732, PRO84733, PRO59776, PRO84734, PRO83839, PRO69472, PRO23253, PRO84735 or PRO37583 polypeptide, said method comprising contacting cells which normally respond to said polypeptide with a candidate compound, and determining the responsiveness by said cell to said candidate compound.

27. A method of stimulating the B cell response in a mammal, said method comprising administering to said mammal an effective amount of a PRO12560, PRO329, PRO71236, PRO1265, PRO71045, PRO71049, PRO37162, PRO160, PRO37534, PRO37544, PRO21787, PRO34330, PRO2540, PRO7, PRO34288, PRO84690, PRO2134, PRO21928, PRO23974, PRO34457, PRO37158, PRO2537, PRO36827, PRO26296, PRO36766, PRO4912, PRO4769, PRO36899, PRO33667, PRO37695, PRO38069, PRO21716, PRO36124, PRO77694, PRO37957, PRO25114, PRO37553, PRO81979, PRO6013, PRO21960, PRO34276, PRO1717, PRO34107, PRO12612, PRO37946, PRO12865, PRO37029, PRO38337, PRO4710, PRO12570, PRO12890, PRO37121, PRO3813, PRO24934, PRO12458, PRO37843, PRO37547, PRO36300, PRO37192, PRO12832, PRO25147, PRO12876, PRO12155, PRO12370, PRO12320, PRO23370, PRO25266, PRO4785, PRO4660, PRO71095, PRO4658, PRO2757, PRO12789, PRO20128, PRO2834, PRO9998, PRO84691, PRO12904, PRO4887, PRO12082, PRO37975, PRO37653, PRO4776, PRO12073, PRO38457, PRO4767, PRO12884, PRO12586, PRO84692, PRO12280, PRO23859, PRO2577, PRO37696, PRO24075, PRO71042, PRO37639, PRO84693, PRO37272, PRO84694, PRO4330, PRO84695, PRO285, PRO38310, PRO37657, PRO71061, PRO209, PRO37584, PRO84696, PRO4860, PRO38492, PRO1738, PRO69476, PRO12032, PRO69484, PRO23460, PRO84476, PRO84697, PRO71207, PRO28714, PRO84698, PRO49839, PRO84441, PRO49214, PRO50523, PRO50241, PRO83773, PRO84699, PRO50772, PRO49326, PRO49824, PRO70333, PRO83673, PRO50332, PRO51295, PRO51621, PRO34958, PRO50821, PRO84700, PRO94701, PRO60333, PRO50187, PRO48357, PRO50365, PRO84702, PRO49810, PRO58710, PRO69503, PRO49564, PRO84703, PRO84663, PRO83800, PRO84704, PRO84705, PRO84706, PRO57996, PRO84368, PRO84496, PRO84707, PRO49765, PRO23253, PRO84709, PRO82352, PRO82903, PRO83260, PRO83681, PRO69487, PRO83148, PRO58958, PRO58399, PRO80649, PRO58425, PRO84376, PRO84309, PRO59142, PRO58810, PRO84710, PRO80648, PRO84711, PRO84712, PRO82872, PRO84714, PRO84183, PRO83879, PRO84715, PRO84716, PRO84717, PRO71206, PRO51950, PRO71035, PRO52268, PRO52040, PRO71288, PRO69458, PRO69903, PRO52672, PRO52174, PRO71289, PRO58230, PRO71238, PRO84718, PRO69632, PRO4913, PRO84265, PRO84719, PRO57922, PRO12613, PRO62312, PRO60891, PRO84720, PRO84721, PRO84722, PRO4854, PRO59611, PRO60271, PRO63074, PRO84723, PRO84724, PRO35972, PRO84434, PRO59476, PRO84725, PRO84726, PRO84727, PRO84728, PRO84729, PRO84730, PRO84731, PRO21326, PRO69478, PRO80846, PRO84611, PRO61948, PRO84732, PRO84733, PRO59776, PRO84734, PRO83839, PRO69472, PRO23253, PRO84735 or PRO37583 polypeptide antagonist, wherein said B cell response is stimulated.

28. A method of diagnosing a B-cell mediated immune response in a mammal, said method comprising detecting the level of expression of a gene encoding PRO12560, PRO329, PRO71236, PRO1265, PRO71045, PRO71049, PRO37162, PRO160, PRO37534, PRO37544, PRO21787, PRO34330, PRO2540, PRO7, PRO34288, PRO84690, PRO2134, PRO21928, PRO23974, PRO34457, PRO37158, PRO2537, PRO36827, PRO26296, PRO36766, PRO4912, PRO4769, PRO36899, PRO33667, PRO37695, PRO38069, PRO21716, PRO36124, PRO77694, PRO37957, PRO25114, PRO37553, PRO81979, PRO6013, PRO21960, PRO34276, PRO1717, PRO34107, PRO12612, PRO37946, PRO12865, PRO37029, PRO38337, PRO4710, PRO12570, PRO12890, PRO37121, PRO3813, PRO24934, PRO12458, PRO37843, PRO37547, PRO36300, PRO37192, PRO12832, PRO25147, PRO12876, PRO12155, PRO12370, PRO12320, PRO23370, PRO25266, PRO4785, PRO4660, PRO71095, PRO4658, PRO2757, PRO12789, PRO20128, PRO2834, PRO9998, PRO84691, PRO12904, PRO4887, PRO12082, PRO37975, PRO37653, PRO4776, PRO12073, PRO38457, PRO4767, PRO12884, PRO12586, PRO84692, PRO12280, PRO23859, PRO2577, PRO37696, PRO24075, PRO71042, PRO37639, PRO84693, PRO37272, PRO84694, PRO4330, PRO84695, PRO285, PRO38310, PRO37657, PRO71061, PRO209, PRO37584, PRO84696, PRO4860, PRO38492, PRO11738, PRO69476, PRO12032, PRO69484, PRO23460, PRO84476, PRO84697, PRO71207, PRO28714, PRO84698, PRO49839, PRO84441, PRO49214, PRO50523, PRO50241, PRO83773, PRO84699, PRO50772, PRO49326, PRO49824, PRO70333, PRO83673, PRO50332, PRO51295, PRO51621, PRO34958, PRO50821, PRO84700, PRO84701, PRO60333, PRO50187, PRO48357, PRO50365, PRO84702, PRO49810, PRO58710, PRO69503, PRO49564, PRO84703, PRO84663, PRO83800, PRO84704, PRO84705, PRO84706, PRO57996, PRO84368, PRO84496, PRO84707, PRO49765, PRO23253, PRO84709, PRO82352, PRO82903, PRO83260, PRO83681, PRO69487, PRO83148, PRO58958, PRO58399, PRO80649, PRO58425, PRO84376, PRO84309, PRO59142, PRO58810, PRO84710, PRO80648, PRO84711, PRO84712, PRO82872, PRO84714, PRO84183, PRO83879, PRO84715, PRO84716, PRO84717, PRO71206, PRO51950, PRO71035, PRO52268, PRO52040, PRO71288, PRO69458, PRO69903, PRO52672, PRO52174, PRO71289, PRO58230, PRO71238, PRO84718, PRO69632, PRO4913, PRO84265, PRO84719, PRO57922, PRO12613, PRO62312, PRO60891, PRO84720, PRO84721, PRO84722, PRO4854, PRO59611, PRO60271, PRO63074, PRO84723, PRO84724, PRO35972, PRO84434, PRO59476, PRO84725, PRO84726, PRO84727, PRO84728, PRO84729, PRO84730, PRO84731, PRO21326, PRO69478, PRO80846, PRO84611, PRO61948, PRO84732, PRO84733, PRO59776, PRO84734, PRO83839, PRO69472, PRO23253, PRO84735 or PRO37583 polypeptide (a) in a test sample of tissue cells obtained from the mammal, and (b) in a control sample of known normal tissue cells of the same cell type, wherein a higher or lower level of expression of said gene in the test sample as compared to the control sample is indicative of the presence of a B cell mediated immune response in the mammal from which the test tissue cells were obtained.

The application's sequence listing, which the Patent Office published only in electronic form, follows.

SEQUENCE LISTING (506 sequences)

SEQ ID NO: 1 - DNA, 972 bp, Homo sapiens
ggcacgagggtaggcactttagctcagtgatggattttaagaacgattacacctgtcgcctgtggtctgactccaggcactcgcgtcaggtacttctgctccaggatagctttatgaattgctctgacagcatcatcaatggttcctttcgtgcgcttggctttattcatgaggctcaggtcggggaaagactgatggtccactgtgacagcaagacaggtaatgcaaatacggatttcatctgggtgggtccagataacagactgctagagccggataaagagatggaaaacttttacgtgtttcacaatggaagtctggttatagaaagccctcgttttgaggatgctggagtgtattcttgtatcgcaatgaataagcaacgcctgttaaatgaaactgtggacgtcacaataaatgtgagcaatttcactgtaagcagatcccatgctcatgaggcatttaacacagcttttaccactcttgctgcttgcgtggccagtatcgttttggtacttttgtacctctatctgactccatgcccctgcaagtgtaaaaccaagagacagaaaaatatgctacaccaaagcaatgcccattcatcgattctcagtcctggccccgctagtgatgcctccgctgatgaacggaaggcaggtgcaggtaaaagagtggtgtttttggaacccctgaaggatactgcagcagggcagaacgggaaagtcaggctctttcccagcgaggcagtgatagctgagggcatcctaaagtccacgagggggaaatctgactcagattcagtcaattcagtgttttctgacacaccttttgtggcgtccacttaatttgtgcctatatttgtatgatgtcataatttaatctgttcatatttaactttgtgtgtggtctgcaaaataaacagcaggacagaaaaaaaaaaaaaaaaaaaaaaaaaaaaaaaaaaaaaaaaaa

SEQ ID NO: 2 - DNA, 4573 bp, Homo sapiens
cgcgtgtctacgcggacgcaccggctaagctgcttctgccgccgccggccgcctgggaccttgcggtgaggctgcgcggggccgaggccgcctccgagcgccaggtttattcagtcaccatgaagctgctgctgctgcacccggccttccagagctgcctcctgctgaccctgcttggcttatggagaaccacccctgaggctcacgcttcatccctgggtgcaccagctatcagcgctgcctccttcctgcaggatctaatacatcggtatggcgagggtgacagcctcactctgcagcagctgaaggccctgctcaaccacctggatgtgggagtgggccggggtaatgtcacccagcacgtgcaaggacacaggaacctctccacgtgctttagttctggagacctcttcactgcccacaatttcagcgagcagtcgcggattgggagcagcgagctccaggagttctgccccaccatcctccagcagctggattcccgggcctgcacctcggagaaccaggaaaacgaggagaatgagcagacggaggaggggcggccaagcgctgttgaagtgtggggatacggtctcctctgtgtgaccgtcatctccctctgctccctcctgggggccagcgtggtgcccttcatgaagaagaccttttacaagaggctgctgctctacttcatagctctggcgattggaaccctctactccaacgccctcttccagctcatcccggaggcatttggtttcaaccctctggaagattattatgtctccaagtctgcagtggtgtttgggggcttttatcttttctttttcacagagaagatcttgaagattcttcttaagcagaaaaatgagcatcatcatggacacagccattatgcctctgagtcgcttccctccaagaaggaccaggaggagggggtgatggagaagctgcagaacggggacctggaccacatgattcctcagcactgcagcagtgagctggacggcaaggcgcccatggtggacgagaaggtcattgtgggctcgctctctgtgcaggacctgcaggcttcccagagtgcttgctactggctgaaaggtgtccgctactctgatatcggcactctggcctggatgatcactctgagcgacggcctccacaatttcatcgatggcctggccatcggtgcttccttcactgtgtcagttttccaaggcatcagcacctcggtggccatcctctgtgaggagttcccacatgagctaggagactttgtcatcctgctcaacgctgggatgagcatccaacaagctctcttcttcaacttcctttctgcctgctgctgctacctgggtctggcctttggcatcctggccggcagccacttctctgccaactggatttttgcgctagctggaggaatgttcttgtatatttctctggctgatatgttccctgagatgaatgaggtctgtcaagaggatgaaaggaagggcagcatcttgattccatttatcatccagaacctgggcctcctgactggattcaccatcatggtggtcctcaccatgtattcaggacagatccagattgggtagggctctgccaagagcctgtgggactggaagtcgggccctgggctgcccgatcgccagcccgaggacttaccatccacaatgcaccacggaagaggccgttctatgaaaaactgacacagactgtattcctgcattcaaatgtcagccgtttgtaaaatgctgtatcctaggaataagctgccctggtaaccagtctctagctagtgcctcttgccctctcctcacctccttttctctcagtgactctggaacctgaatgcagcttacaagacaagcctgacttttttctctgattaccttggcctcctcttggaaccagtgctgaaaggttttgaatcctttacccaacaatgcaaaaatagagccaatggttataacttggctagaaatatcaagagttgaatccatagtgtggggcccatgactctagctgggcaccttggacctccagctggccaatagaagagacaggagacaggaagccttcccattttttcaaagtctgtttaattgcctattacttctctcaaagagaacctgaagtcagaacacatgagcagggtgagaggtgaggcaaggttcatcctgaatgggagaggaagtcgaaccactgctgtgtgtcttgtcaggatgctcacttgttcctactgagatgctggatattgattttgtaacagcacctggtgtttcacggctgtccgagtgagctaacgtggcggtgtggctgcctggacctcctctttcaggttaacgctgacagaatggaggctcaggctgtctgcaagaaaacagttggtttggctgtgattttgacctcctcttccccactgccatcttctaagagactttgtagctgcctcctagaagcacattctgagcacatttgagacctctgtgttagaggggagactgcacaaactatcctcccccaggttgagacgtctgcagagtggcaagctgacttgtagaaatggggtgccatttatgctctacttagacaagggtaatcagaaatggaatcagtgcaggcaaaatttaggatttgccgcttccataaatcaaagcatgactaatagggggtctctgaaatgtaagggcacaaacttcacttagggcatcgcagatgtttgcagaatggttggcctaatgattatgctacagatgggttttaaatgacccgtctaggttactgcttccttgcaaaaaaagtcgaatcctgcattgaattgaatatgaatttctctaactctctccagaaaatggatggagataacttgtctttaaaactgtaggccagccttagccactgtggagcccttgcctccgagctctggcttcaaggggagctcttctccaggttcactaggtgaattgatttattattatcatattgataatgtgagattctttagccactttggggagcctgtctctccagaagcctttcttagtggtgcccacagttggagcccaggggccatgtttgcaaactgattcatgtgcatggctgacaggagtactggttcactaccaatgcctgagcttttctcttacatagaaaaactgtccactctcagtaatcacaagcagcatccgttttgttttctcttcttgggagacatctgtcaaaccaggaatattcttgaaaagaacgtgagcaggaaaaactgctggtgatactttttttaagttttgtttttatcttgcctgttggcttcaatacatttgagaatacgctgaagagggaaaatttcagtgatggagattctagattaaatatcaggactgatttcctggtgggattatggtccagttttaccaaagaaccaattccttgaatgttggaatctaactttttatattgtcattattattgttgtttttaaacggttctttgtcttttctgttttatttttctcaagctgctttcaggagctagcagaaaataactcaaagttgaagactctggaagattttgctttaacctaactcgcattgatgtattaaatttataattttagcattcccaatagatcctatcattccttaaacataataccctttgtcttggagtagaatactaagttagagttagtggatttctagtttaggagaggagctcaaaactataatctttaacaaattgaaaaatgaaatagggtgttttccctttttgtgcacacctatattaccttaagaaatttccttccatagacagctgcctcaaagggaaatcctctttaaaccgtagttggcgcagaggtcagtcctagtcggagcttaggaggggcggagacgctcacatcgtctgacttgagtcgccactgattgtggcaacagctttgcctcatgagtcaaaaattggcaatttcttttgatttttagttgttgaatttgctgtttcaagcatttgtacatattagaagtctaaggagtagcaagtcagtgggaggactttttcacccctggcattagcagcttcgacctcattttccagatgcaccagctcctattaataagttagcaaggaaagtgtatgtcacgtgcaggaacagtgaggcagggacaggggttctgctccttctcacttcaccaccggcacacagcttgcccctgtctttgcccccaaaggtattttgtgtctagtgtcaaattggagctattcttcactggtccttaaccttgggttttaaaaagaaggcttctctgtttgggtagcgtaagagctgagtatagtaagtcctcttccaaagagatggcaatatgctgggcatctactttaaaacaaagttgtctgatttttgcaagagaggttaggattttattgttcttatttccctttacagttctgcagttccatcacagtatttttttaaataactcaggtgtatgagcagaaattagaaaagaaaattaacttatgtggactgtaaatgttttatttgtaagattctataaataaagctatattctgt

SEQ ID NO: 3 - protein, 531 aa, Homo sapiens
RVYADAPAKLLLPPPAAWDLAVRLRGAEAASERQVYSVTMKLLLLHPAFQSCLLLTLLGLWRTTPEAHASSLGAPAISAASFLQDLIHRYGEGDSLTLQQLKALLNHLDVGVGRGNVTQHVQGHRNLSTCFSSGDLFTAHNFSEQSRIGSSELQEFCPTILQQLDSRACTSENQENEENEQTEEGRPSAVEVWGYGLLCVTVISLCSLLGASVVPFMKKTFYKRLLLYFIALAIGTLYSNALFQLIPEAFGFNPLEDYYVSKSAVVFGGFYLFFFTEKILKILLKQKNEHHHGHSHYASESLPSKKDQEEGVMEKLQNGDLDHMIPQHCSSELDGKAPMVDEKVIVGSLSVQDLQASQSACYWLKGVRYSDIGTLAWMITLSDGLHNFIDGLAIGASFTVSVFQGISTSVAILCEEFPHELGDFVILLNAGMSIQQALFFNFLSACCCYLGLAFGILAGSHFSANWIFALAGGMFLYISLADMFPEMNEVCQEDERKGSILIPFIIQNLGLLTGFTIMVVLTMYSGQIQIG

SEQ ID NO: 4 - DNA, 2181 bp, Homo sapiens
ggcacgagggatgcaaggagatgagacagttagatttacttcctcttttctaatctgagaggtttcatgttgaagaaaatcagtgttggggttgcaggagacctaaacacagtcaccatgaagctgggctgtgtcctcatggcctgggccctctacctttcccttggtgtgctctgggtggcccagatgctactggctgccagttttgagacgctgcagtgtgagggacctgtctgcactgaggagagcagctgccacacggaggatgacttgactgatgcaagggaagctggcttccaggtcaaggcctacactttcagtgaacccttccacctgattgtgtcctatgactggctgatcctccaaggtccagccaagccagtttttgaaggggacctgctggttctgcgctgccaggcctggcaagactggccactgactcaggtgaccttctaccgagatggctcagctctgggtccccccgggcctaacagggaattctccatcaccgtggtacaaaaggcagacagcgggcactaccactgcagtggcatcttccagagccctggtcctgggatcccagaaacagcatctgttgtggctatcacagtccaagaactgtttccagcgccaattctcagagctgtaccctcagctgaaccccaagcaggaagccccatgaccctgagttgtcagacaaagttgcccctgcagaggtcagctgcccgcctcctcttctccttctacaaggatggaaggatagtgcaaagcagggggctctcctcagaattccagatccccacagcttcagaagatcactccgggtcatactggtgtgaggcagccactgaggacaaccaagtttggaaacagagcccccagctagagatcagagtgcagggtgcttccagctctgctgcacctcccacattgaatccagctcctcagaaatcagctgctccaggaactgctcctgaggaggcccctgggcctctgcctccgccgccaaccccatcttctgaggatccaggcttttcttctcctctggggatgccagatcctcatctgtatcaccagatgggccttcttctcaaacacatgcaggatgtgagagtcctcctcggtcacctgctcatggagttgagggaattatctggccaccagaagcctgggaccacaaaggctactgctgaatagaagtaaacagttcatccatgatctcacttaaccaccccaataaatctgattctttattttctcttcctgtcctgcacatatgcataagtacttttacaagttgtcccagtgttttgttagaataatgtagttaggtgagtgtaaataaatttatataaagtgagaattagagtttagctataattgtgtattctctcttaacacaacagaattctgctgtctagatcaggaatttctatctgttatatcgaccagaatgttgtgatttaaagagaactaatggaagtggattgaatacagcagtctcaactgggggcaattttgccccccagaggacattgggcaatgtttggagacattttggtcattatacttggggggttgggggatggtgggatgtgtgtgctactggcatccagtaaatagaagccaggggtgccgctaaacatcctataatgcacagggcagtaccccacaacgaaaaataatctggcccaaaatgtcagttgtactgagtttgagaaaccccagcctaatgaaaccctaggtgttgggctctggaatgggactttgtcccttctaattattatctctttccagcctcattcagctattcttactgacataccagtctttagctggtgctatggtctgttctttagttctagtttgtatcccctcaaaagccattatgttgaaatcctaatccccaaggtgatggcattaagaagtgggcctttgggaagtgattagatcaggagtgcagagccctcatgattaggattagtgcccttatttaaaaaggccccagagagctaactcacccttccaccatatgaggacgtggcaagaagatgacatgtatgagaaccaaaaaacagctgtcgccaaacaccgactctgtcgttgccttgatcttgaacttccagcctccagaactatgagaaataaaattctgttgtttgtaaaaaaaaaaaaaaaaaa

SEQ ID NO: 5 - protein, 359 aa, Homo sapiens
MKLGCVLMAWALYLSLGVLWVAQMLLAASFETLQCEGPVCTEESSCHTEDDLTDAREAGFQVKAYTFSEPFHLIVSYDWLILQGPAKPVFEGDLLVLRCQAWQDWPLTQVTFYRDGSALGPPGPNREFSITVVQKADSGHYHCSGIFQSPGPGIPETASVVAITVQELFPAPILRAVPSAEPQAGSPMTLSCQTKLPLQRSAARLLFSFYKDGRIVQSRGLSSEFQIPTASEDHSGSYWCEAATEDNQVWKQSPQLEIRVQGASSSAAPPTLNPAPQKSAAPGTAPEEAPGPLPPPPTPSSEDPGFSSPLGMPDPHLYHQMGLLLKHMQDVRVLLGHLLMELRELSGHQKPGTTKATAE

SEQ ID NO: 6 - DNA, 2176 bp, Homo sapiens
tcctgtctcaggcaggccctgcgcctcctatgcggagatgctactgccactgctgctgtcctcgctgctgggcgggtcccaggctatggatgggagattctggatacgagtgcaggagtcagtgatggtgccggagggcctgtgcatctctgtgccctgctctttctcctacccccgacaagactggacagggtctaccccagcttatggctactggttcaaagcagtgactgagacaaccaagggtgctcctgtggccacaaaccaccagagtcgagaggtggaaatgagcacccggggccgattccagctcactggggatcccgccaaggggaactgctccttggtgatcagagacgcgcagatgcaggatgagtcacagtacttctttcgggtggagagaggaagctatgtgagatataatttcatgaacgatgggttctttctaaaagtaacagccctgactcagaagcctgatgtctacatccccgagaccctggagcccgggcagccggtgacggtcatctgtgtgtttaactgggcctttgaggaatgtccacccccttctttctcctggacgggggctgccctctcctcccaaggaaccaaaccaacgacctcccacttctcagtgctcagcttcacgcccagaccccaggaccacaacaccgacctcacctgccatgtggacttctccagaaagggtgtgagcgtacagaggaccgtccgactccgtgtggcctatgcccccagagaccttgttatcagcatttcacgtgacaacacgccagccctggagccccagccccagggaaatgtcccatacctggaagcccaaaaaggccagttcctgcggctcctctgtgctgctgacagccagccccctgccacactgagctgggtcctgcagaacagagtcctctcctcgtcccatccctggggccctagacccctggggctggagctgcccggggtgaaggctggggattcagggcgctacacctgccgagcggagaacaggcttggctcccagcagcgagccctggacctctctgtgcagtatcctccagagaacctgagagtgatggtttcccaagcaaacaggacagtcctggaaaaccttgggaacggcacgtctctcccagtactggagggccaaagcctgtgcctggtctgtgtcacacacagcagccccccagccaggctgagctggacccagaggggacaggttctgagcccctcccagccctcagaccccggggtcctggagctgcctcgggttcaagtggagcacgaaggagagttcacctgccacgctcggcacccactgggctcccagcacgtctctctcagcctctccgtgcactactccccgaagctgctgggcccctcctgctcctgggaggctgagggtctgcactgcagctgctcctcccaggccagcccggccccctctctgcgctggtggcttggggaggagctgctggaggggaacagcagccaggactccttcgaggtcacccccagctcagccgggccctgggccaacagctccctgagcctccatggagggctcagctctggcctcaggctccgctgtgaggcctggaacgtccatggggcccagagtggatccatcctgcagctgccagataagaagggactcatctcaacggcattctccaacggagcgtttctgggaatcggcatcacggctcttcttttcctctgcctggccctgatcatcatgaagattctaccgaagagacggactcagacagaaaccccgaggcccaggttctcccggcacagcacgatcctggattacatcaatgtggtcccgacggctggccccctggctcagaagcggaatcagaaagccacaccaaacagtcctcggacccctcttccaccaggtgctccctccccagaatcaaagaagaaccagaaaaagcagtatcagttgcccagtttcccagaacccaaatcatccactcaagccccagaatcccaggagagccaagaggagctccattatgccacgctcaacttcccaggcgtcagacccaggcctgaggcccggatgcccaagggcacccaggcggattatgcagaagtcaagttccaatgagggtctcttaggctttaggactgggacttcggctagggaggaagg

SEQ ID NO: 7 - protein, 697 aa, Homo sapiens
MLLPLLLSSLLGGSQAMDGRFWIRVQESVMVPEGLCISVPCSFSYPRQDWTGSTPAYGYWFKAVTETTKGAPVATNHQSREVEMSTRGRFQLTGDPAKGNCSLVIRDAQMQDESQYFFRVERGSYVRYNFMNDGFFLKVTALTQKPDVYIPETLEPGQPVTVICVFNWAFEECPPPSFSWTGAALSSQGTKPTTSHFSVLSFTPRPQDHNTDLTCHVDFSRKGVSVQRTVRLRVAYAPRDLVISISRDNTPALEPQPQGNVPYLEAQKGQFLRLLCAADSQPPATLSWVLQNRVLSSSHPWGPRPLGLELPGVKAGDSGRYTCRAENRLGSQQRALDLSVQYPPENLRVMVSQANRTVLENLGNGTSLPVLEGQSLCLVCVTHSSPPARLSWTQRGQVLSPSQPSDPGVLELPRVQVEHEGEFTCHARHPLGSQHVSLSLSVHYSPKLLGPSCSWEAEGLHCSCSSQASPAPSLRWWLGEELLEGNSSQDSFEVTPSSAGPWANSSLSLHGGLSSGLRLRCEAWNVHGAQSGSILQLPDKKGLISTAFSNGAFLGIGITALLFLCLALIIMKILPKRRTQTETPRPRFSRHSTILDYINVVPTAGPLAQKRNQKATPNSPRTPLPPGAPSPESKKNQKKQYQLPSFPEPKSSTQAPESQESQEELHYATLNFPGVRPRPEARMPKGTQADYAEVKFQ

SEQ ID NO: 8 - DNA, 1798 bp, Homo sapiens
gacagtggagggcagtggagaggaccgcgctgtcctgctgtcaccaagagctggagacaccatctcccaccgagagtcatggccccattggccctgcacctcctcgtcctcgtccccatcctcctcagcctggtggcctcccaggactggaaggctgaacgcagccaagaccccttcgagaaatgcatgcaggatcctgactatgagcagctgctcaaggtggtgacctgggggctcaatcggaccctgaagccccagagggtgattgtggttggcgctggtgtggccgggctggtggccgccaaggtgctcagcgatgctggacacaaggtcaccatcctggaggcagataacaggatcgggggccgcatcttcacctaccgggaccagaacacgggctggattggggagctgggagccatgcgcatgcccagctctcacaggatcctccacaagctctgccagggcctggggctcaacctgaccaagttcacccagtacgacaagaacacgtggacggaggtgcacgaagtgaagctgcgcaactatgtggtggagaaggtgcccgagaagctgggctacgccttgcgtccccaggaaaagggccactcgcccgaagacatctaccagatggctctcaaccaggccctcaaagacctcaaggcactgggctgcagaaaggcgatgaagaagtttgaaaggcacacgctcttggaatatcttctcggggaggggaacctgagccggccggccgtgcagcttctgggagacgtgatgtccgaggatggcttcttctatctcagcttcgccgaggccctccgggcccacagctgcctcagcgacagactccagtacagccgcatcgtgggtggctgggacctgctgccgcgcgcgctgctgagctcgctgtccgggcttgtgctgttgaacgcgcccgtggtggcgatgacccagggaccgcacgatgtgcacgtgcagatcgagacctctcccccggcgcggaatctgaaggtgctgaaggccgacgtggtgctgctgacggcgagcggaccggcggtgaagcgcatcaccttctcgccgccgctgccccgccacatgcaggaggcgctgcggaggctgcactacgtgccggccaccaaggtgttcctaagcttccgcaggcccttctggcgcgaggagcacattgaaggcggccactcaaacaccgatcgcccgtcgcgcatgattttctacccgccgccgcgcgagggcgcgctgctgctggcctcgtacacgtggtcggacgcggcggcagcgttcgccggcttgagccgggaagaggcgttgcgcttggcgctcgacgacgtggcggcattgcacgggcctgtcgtgcgccagctctgggacggcaccggcgtcgtcaagcgttgggcggaggaccagcacagccagggtggctttgtggtacagccgccggcgctctggcaaaccgaaaaggatgactggacggtcccttatggccgcatctactttgccggcgagcacaccgcctacccgcacggctgggtggagacggcggtcaagtcggcgctgcgcgccgccatcaagatcaacagccggaaggggcctgcatcggacacggccagccccgaggggcacgcatctgacatggaggggcaggggcatgtgcatggggtggccagcagcccctcgcatgacctggcaaaggaagaaggcagccaccctccagtccaaggccagttatctctccaaaacacgacccacacgaggacctcgcattaaagtattttcggaaaaa

SEQ ID NO: 9 - protein, 567 aa, Homo sapiens
MAPLALHLLVLVPILLSLVASQDWKAERSQDPFEKCMQDPDYEQLLKVVTWGLNRTLKPQRVIVVGAGVAGLVAAKVLSDAGHKVTILEADNRIGGRIFTYRDQNTGWIGELGAMRMPSSHRILHKLCQGLGLNLTKFTQYDKNTWTEVHEVKLRNYVVEKVPEKLGYALRPQEKGHSPEDIYQMALNQALKDLKALGCRKAMKKFERHTLLEYLLGEGNLSRPAVQLLGDVMSEDGFFYLSFAEALRAHSCLSDRLQYSRIVGGWDLLPRALLSSLSGLVLLNAPVVAMTQGPHDVHVQIETSPPARNLKVLKADVVLLTASGPAVKRITFSPPLPRHMQEALRRLHYVPATKVFLSFRRPFWREEHIEGGHSNTDRPSRMIFYPPPREGALLLASYTWSDAAAAFAGLSREEALRLALDDVAALHGPVVRQLWDGTGVVKRWAEDQHSQGGFVVQPPALWQTEKDDWTVPYGRIYFAGEHTAYPHGWVETAVKSALRAAIKINSRKGPASDTASPEGHASDMEGQGHVHGVASSPSHDLAKEEGSHPPVQGQLSLQNTTHTRTSH

SEQ ID NO: 10 - DNA, 1835 bp, Homo sapiens
gtgcagttgcggctccagggccatggcggaggagcagggccgggaacgggactcggttcccaagccgtcggtgctgttcctccacccagacctgggcgtgggcggcgctgagcggctggtgttggacgcggcgctggcgctgcaggcgcgcgggtgtagcgtgaagatctggacagcgcactacgacccgggccactgtttcgccgagagccgcgagctaccggtgcgctgtgccggggactggctgccgcgaggcctgggctggggcggccgcggcgccgccgtctgcgcctacgtgcgcatggttttcctggcgctctacgtgctgttcctcgccgacgaggagttcgacgtggtagtgtgcgaccaggtgtctgcctgtatcccagtgttcaggctggctagacggcggaagaagatcctattttactgtcacttcccagatctgcttctcaccaagagagattcttttcttaaacgactatacagggccccaattgactggatagaggaatacaccacaggcatggcagactgcatcttagtcaacagccagttcacagctgctgtttttaaggaaacattcaagtccctgtctcacatagaccctgatgtcctctatccatctctaaatgtcaccagctttgactcagttgttcctgaaaagctggatgacctagtccccaaggggaaaaaattcctgctgctctccatcaacagatacgaaaggaagaaaaatctgactttggcactggaagccctagtacagctgcgtggaagattgacatcccaagattgggagagggttcatctgatcgtggcaggtggttatgacgagagagtcctggagaatgtggaacattatcaggaattgaagaaaatggtccaacagtccgaccttggccagtatgtgaccttcttgaggtctttctcagacaaacagaaaatctccctcctccacagctgcacgtgtgtgctttacacaccaagcaatgagcactttggcattgtccctctggaagccatgtacatgcagtgcccagtcattgctgttaattcgggtggacccttggagtccattgaccacagtgtcacagggtttctgtgtgagcctgacccggtgcacttctcagaagcaatagaaaagttcatccgtgaaccttccttaaaagccaccatgggcctggctggaagagccagagtgaaggaaaaattttcccctgaagcatttacagaacagctctaccgatatgttaccaaactgctggtataatcagattgtttttaagatctccattaatgtcatttttatggattgtagacccagttttgaaaccaaaaaagaaacctagaatctaatgcagaagagatcttttaaaaaataaacttgagtcttgaatgtgagccactttcctatataccacacctccctgtccacttttcagaaaaaccatgtcttttatgctataatcattccaaattttgccagtgttaagttacaaatgtggtgtcattccatgttcagcagagtattttaattatattttctcgggattattgctcttctgtctataaattttgaatgatactgtgccttaattggttttcatagtttaagtgtgtatcattatcaaagttgattaatttggcttcatagtataatgagagcagggctattgtagttcccagattcaatccaccgaagtgttcactgtcatctgttagggaatttttgtttgtcctgtctttgcctggatccatagcgagagtgctctgtattttttttaagataatttgtatttttgcacactgagatataataaaaggtgtttatc

SEQ ID NO: 11 - protein, 416 aa, Homo sapiens
MAEEQGRERDSVPKPSVLFLHPDLGVGGAERLVLDAALALQARGCSVKIWTAHYDPGHCFAESRELPVRCAGDWLPRGLGWGGRGAAVCAYVRMVFLALYVLFLADEEFDVVVCDQVSACIPVFRLARRRKKILFYCHFPDLLLTKRDSFLKRLYRAPIDWIEEYTTGMADCILVNSQFTAAVFKETFKSLSHIDPDVLYPSLNVTSFDSVVPEKLDDLVPKGKKFLLLSINRYERKKNLTLALEALVQLRGRLTSQDWERVHLIVAGGYDERVLENVEHYQELKKMVQQSDLGQYVTFLRSFSDKQKISLLHSCTCVLYTPSNEHFGIVPLEAMYMQCPVIAVNSGGPLESIDHSVTGFLCEPDPVHFSEAIEKFIREPSLKATMGLAGRARVKEKFSPEAFTEQLYRYVTKLLV

SEQ ID NO: 12 - DNA, 2025 bp, Homo sapiens
agtgcgtgagtttggtggcggccggctgtgcagagacgccatgtaccggctcctgtcagcagtgactgcccgggctgccgcccccgggggcttggcctcaagctgcggacgacgcggggtccatcagcgcgccgggctgccgcctctcggccacggctgggtcgggggcctcgggctggggctggggctggcgctcggggtgaagctggcaggtgggctgagtggcgcggccccggcgcagtcccccgcggcccccgaccctgaggcgtcgcctctggccgagccgccacaggagcagtccctcgccccgtggtctccgcagaccccggcgccgccctgctccaggtgcttcgccagagccatcgagagcagccgcgacctgctgcacaggatcaaggatgaggtgggcgcaccgggcatagtggttggagtttctgtagatggaaaagaagtctggtcagaaggtttaggttatgctgatgttgagaaccgtgtaccatgtaaaccagagacagttatgcgaattgctagcatcagcaaaagtctcaccatggttgctcttgccaaattgtgggaagcggggaaactggatcttgatattccagtacaacattatgttcccgaattcccagaaaaagaatatgaaggtgaaaaggtttctgtcacaacaagattactgatttcccatttaagtggaattcgtcattatgaaaaggacataaaaaaggtgaaagaagagaaagcttataaagccttgaagatgatgaaagagaatgttgcatttgagcaagaaaaagaaggcaaaagtaatgaaaagaatgattttactaaatttaaaacagagcaggagaatgaagccaaatgccggaattcaaaacctggcaagaaaaagaatgattttgaacaaggcgaattatatttgagagaaaagtttgaaaattcaattgaatccctaagattatttaaaaatgatcctttgttcttcaaacctggtagtcagtttttgtattcaacttttggctataccctactggcagccatagtagagagagcttcaggatgtaaatatttggactatatgcagaaaatattccatgacttggatatgctgacgactgtgcaggaagaaaacgagccagtgatttacaatagagcaaggtaaatgaataccttctgctgtgtctagctatatcgcatcttaacactattttattaattaaaagtcaaattttctttgtttccattccaaaatcaacctgccacattttgggagcttttctacatgtctgttttctcatctgtaaagtgaaggaagtaaaacatgtttataaagtacactaagaccctttgatgaaagatagcaataatattaataattcaaacatgaataactaaaccaaaattgcacccaccatgagcatctgtaatttgctctttaaccattccttttttaggttttaactaatactttgtttacgtgttattagtttttaattgttttcatactgttttgaaataattttatacttatagaaaagttgcaagagtagtacaaaggattcacatatcctctttactcagattcccttaatgttagtttaccgcatttgcattacctttctgtctacatatgtgtttgtttctgaaccatttggaaataagttgtagacgtgatacccctttacctataaatatttacatgtgtattttctaaaaacaaggacattcagggccgggtgcagtggctcacgcctgtaatcccaacactttggaaggccgaggtgggtggatcacctgaggtcaggagttcaagaccagcctggccaatgtggtgaaatcaaccctctctctactaaaaatgcaaaaattagccaggtgtggtggcgggtgcctataatcccagccacgcgggaggctgaggcaggagaatcgcttgaacccaggaggtggagttgcagtaagccaagatcgtgcccctgcacttcaggctgggcgaaagagtgagactccatgtcaaaaaaggat

SEQ ID NO: 13 - protein, 373 aa, Homo sapiens [sequence omitted]

SEQ ID NO: 14 - DNA, 1497 bp, Homo sapiens
accgctggccccagggaaagccgagcggccaccgagccggcagagacccaccgagcggcggcggagggagcagcgccggggcgcacgagggcaccatggcccagacgcccgccttcgacaagcccaaagtagaactgcatgtccacctagacggatccatcaagcctgaaaccatcttatactatggcaggaggagagggatcgccctcccagctaacacagcagaggggctgctgaacgtcattggcatggacaagccgctcacccttccagacttcctggccaaatttgactactacatgcctgctatcgcgggctgccgggaggctatcaaaaggatcgcctatgagtttgtagagatgaaggccaaagagggcgtggtgtatgtggaggtgcggtacagtccgcacctgctggccaactccaaagtggagccaatcccctggaaccaggctgaaggggacctcaccccagacgaggtggtggccctagtgggccagggcctgcaggagggggagcgagacttcggggtcaaggcccggtccatcctgtgctgcatgcgccaccagcccaactggtcccccaaggtggtggagctgtgtaagaactaccagcagcagaccgtggtagccattgacctggctggagatgagaccatcccaggaagcagcctcttgcctggacatgtccaggcctaccaggaggctgtgaagagcggcattcaccgtactgtccacgccggggaggtgggctcggccgaagtagtaaaagaggctgtggacatactcaagacagagcggctgggacacggctaccacaccctggaagaccaggccctttataacaggctgcggcaggaaaacatgcacttcgagatctgcccctggtccagctacctcactggtgcctggaagccggacacggagcatgcagtcattcggctcaaaaatgaccaggctaactactcgctcaacacagatgacccgctcatcttcaagtccaccctggacactgattaccagatgaccaaacgggacatgggctttactgaagaggagtttaaaaggctgaacatcaatgcggccaaatctagtttcctcccagaagatgaaaagagggagcttctcgacctgctctataaagcctatgggatgccaccttcagcctctgcagggcagaacctctgaagacgccactcctccaagccttcaccctgtggagtcaccccaactctgtggggctgagcaacatttttacatttattccttccaagaagaccatgatctcaatagtcagttactgatgctcctgaaccctatgtgtccatttctgcacacacgtatacctcggcatggccgcgtcacttctctgattatgtgccctggcagggaccagcgcccttgcacatgggcatggttgaatctgaaaccctccttctgtggcaacttgtactgaaaatctggtgctcaataaagaagcccatggctggtggcatgc

SEQ ID NO: 15 - protein, 363 aa, Homo sapiens
MAQTPAFDKPKVELHVHLDGSIKPETILYYGRRRGIALPANTAEGLLNVIGMDKPLTLPDFLAKFDYYMPAIAGCREAIKRIAYEFVEMKAKEGVVYVEVRYSPHLLANSKVEPIPWNQAEGDLTPDEVVALVGQGLQEGERDFGVKARSILCCMRHQPNWSPKVVELCKNYQQQTVVAIDLAGDETIPGSSLLPGHVQAYQEAVKSGIHRTVHAGEVGSAEVVKEAVDILKTERLGHGYHTLEDQALYNRLRQENMHFEICPWSSYLTGAWKPDTEHAVIRLKNDQANYSLNTDDPLIFKSTLDTDYQMTKRDMGFTEEEFKRLNINAAKSSFLPEDEKRELLDLLYKAYGMPPSASAGQNL

SEQ ID NO: 16 - DNA, 2986 bp, Homo sapiens
gcgccccagtcgacgctgagctcctctgctactcagagttgcaacctcagcctcgctatggctcccagcagcccccggcccgcgctgcccgcactcctggtcctgctcggggctctgttcccaggacctggcaatgcccagacatctgtgtccccctcaaaagtcatcctgccccggggaggctccgtgctggtgacatgcagcacctcctgtgaccagcccaagttgttgggcatagagaccccgttgcctaaaaaggagttgctcctgcctgggaacaaccggaaggtgtatgaactgagcaatgtgcaagaagatagccaaccaatgtgctattcaaactgccctgatgggcagtcaacagctaaaaccttcctcaccgtgtactggactccagaacgggtggaactggcacccctcccctcttggcagccagtgggcaagaaccttaccctacgctgccaggtggagggtggggcaccccgggccaacctcaccgtggtgctgctccgtggggagaaggagctgaaacgggagccagctgtgggggagcccgctgaggtcacgaccacggtgctggtgaggagagatcaccatggagccaatttctcgtgccgcactgaactggacctgcggccccaagggctggagctgtttgagaacacctcggccccctaccagctccagacctttgtcctgccagcgactcccccacaacttgtcagcccccgggtcctagaggtggacacgcaggggaccgtggtctgttccctggacgggctgttcccagtctcggaggcccaggtccacctggcactgggggaccagaggttgaaccccacagtcacctatggcaacgactccttctcggccaaggcctcagtcagtgtgaccgcagaggacgagggcacccagcggctgacgtgtgcagtaatactggggaaccagagccaggagacactgcagacagtgaccatctacagctttccggcgcccaacgtgattctgacgaagccagaggtctcagaagggaccgaggtgacagtgaagtgtgaggcccaccctagagccaaggtgacgctgaatggggttccagcccagccactgggcccgagggcccagctcctgctgaaggccaccccagaggacaacgggcgcagcttctcctgctctgcaaccctggaggtggccggccagcttatacacaagaaccagacccgggagcttcgtgtcctgtatggcccccgactggacgagagggattgtccgggaaactggacgtggccagaaaattcccagcagactccaatgtgccaggcttgggggaacccattgcccgagctcaagtgtctaaaggatggcactttcccactgcccatcggggaatcagtgactgtcactcgagatcttgagggcacctacctctgtcgggccaggagcactcaaggggaggtcacccgcgaggtgaccgtgaatgtgctctccccccggtatgagattgtcatcatcactgtggtagcagccgcagtcataatgggcactgcaggcctcagcacgtacctctataaccgccagcggaagatcaagaaatacagactacaacaggcccaaaaagggacccccatgaaaccgaacacacaagccacgcctccctgaacctatcccgggacagggcctcttcctcggccttcccatattggtggcagtggtgccacactgaacagagtggaagacatatgccatgcagctacacctaccggccctgggacgccggaggacagggcattgtcctcagtcagatacaacagcatttggggccatggtacctgcacacctaaaacactaggccacgcatctgatctgtagtcacatgactaagccaagaggaaggagcaagactcaagacatgattgatggatgttaaagtctagcctgatgagaggggaagtggtgggggagacatagccccaccatgaggacatacaactgggaaatactgaaacttgctgcctattgggtatgctgaggcccacagacttacagaagaagtggccctccatagacatgtgtagcatcaaaacacaaaggcccacacttcctgacggatgccagcttgggcactgctgtctactgaccccaacccttgatgatatgtatttattcatttgttattttaccagctatttattgagtgtcttttatgtaggctaaatgaacataggtctctggcctcacggagctcccagtccatgtcacattcaaggtcaccaggtacagttgtacaggttgtacactgcaggagagtgcctggcaaaaagatcaaatggggctgggacttctcattggccaacctgcctttccccagaaggagtgatttttctatcggcacaaaagcactatatggactggtaatggttcacaggttcagagattacccagtgaggccttattcctcccttccccccaaaactgacacctttgttagccacctccccacccacatacatttctgccagtgttcacaatgacactcagcggtcatgtctggacatgagtgcccagggaatatgcccaagctatgccttgtcctcttgtcctgtttgcatttcactgggagcttgcactattgcagctccagtttcctgcagtgatcagggtcctgcaagcagtggggaagggggccaaggtattggaggactccctcccagctttggaagggtcatccgcgtgtgtgtgtgtgtgtatgtgtagacaagctctcgctctgtcacccaggctggagtgcagtggtgcaatcatggttcactgcagtcttgaccttttgggctcaagtgatcctcccacctcagcctcctgagtagctgggaccataggctcacaacaccacacctggcaaatttgattttttttttttttttcagagacggggtctcgcaacattgcccagacttcctttgtgttagttaataaagctttctcaactgcc

SEQ ID NO: 17 - protein, 532 aa, Homo sapiens
MAPSSPRPALPALLVLLGALFPGPGNAQTSVSPSKVILPRGGSVLVTCSTSCDQPKLLGIETPLPKKELLLPGNNRKVYELSNVQEDSQPMCYSNCPDGQSTAKTFLTVYWTPERVELAPLPSWQPVGKNLTLRCQVEGGAPRANLTVVLLRGEKELKREPAVGEPAEVTTTVLVRRDHHGANFSCRTELDLRPQGLELFENTSAPYQLQTFVLPATPPQLVSPRVLEVDTQGTVVCSLDGLFPVSEAQVHLALGDQRLNPTVTYGNDSFSAKASVSVTAEDEGTQRLTCAVILGNQSQETLQTVTIYSFPAPNVILTKPEVSEGTEVTVKCEAHPRAKVTLNGVPAQPLGPRAQLLLKATPEDNGRSFSCSATLEVAGQLIHKNQTRELRVLYGPRLDERDCPGNWTWPENSQQTPMCQAWGNPLPELKCLKDGTFPLPIGESVTVTRDLEGTYLCRARSTQGEVTREVTVNVLSPRYEIVIITVVAAAVIMGTAGLSTYLYNRQRKIKKYRLQQAQKGTPMKPNTQATPP

SEQ ID NO: 18 - DNA, 732 bp, Homo sapiens
tgctgcgaaccacgtgggtcccgggcgcgtttcgggtgctggcggctgcagccggagttcaaacctaagcagctggaaggaaccatggccaactgtgagcgtaccttcattgcgatcaaaccagatggggtccagcggggtcttgtgggagagattatcaagcgttttgagcagaaaggattccgccttgttggtctgaaattcatgcaagcttccgaagatcttctcaaggaacactacgttgacctgaaggaccgtccattctttgccggcctggtgaaatacatgcactcagggccggtagttgccatggtctgggaggggctgaatgtggtgaagacgggccgagtcatgctcggggagaccaaccctgcagactccaagcctgggaccatccgtggagacttctgcatacaagttggcaggaacattatacatggcagtgattctgtggagagtgcagagaaggagatcggcttgtggtttcaccctgaggaactggtagattacacgagctgtgctcagaactggatctatgaatgacaggagggcagaccacattgcttttcacatccatttcccctccttcccatgggcagaggaccaggctgtaggaaatctagttatttacaggaacttcatcataatttggagggaagctcttggagctgtgagttctccctgtacagtgttaccatccccgaccatctgattaaaatgcttcctcccagc

SEQ ID NO: 19 - protein, 152 aa, Homo sapiens
MANCERTFIAIKPDGVQRGLVGEIIKRFEQKGFRLVGLKFMQASEDLLKEHYVDLKDRPFFAGLVKYMHSGPVVAMVWEGLNVVKTGRVMLGETNPADSKPGTIRGDFCIQVGRNIIHGSDSVESAEKEIGLWFHPEELVDYTSCAQNWIYE

SEQ ID NO: 20 - DNA, 2984 bp, Homo sapiens
taactgagcgaggagcaattgattaatagctcggcgaggggactcactgactgttataataacactacaccagcaactcctggcttcccagcagccggaacacagacaggagagagtcagtggcaaatagacatttttcttatttcttaaaaaacagcaacttgtttgctacttttatttctgttgatttttttttcttggtgtgtgtggtggttgtttttaagtgtggagggcaaaaggagataccatcccaggctcagtccaacccctctccaaaacggcttttctgacactccaggtagcgagggagttgggtctccaggttgtgcgaggagcaaatgatgaccgccaaggccgtagacaaaatcccagtaactctcagtggttttgtgcaccagctgtctgacaacatctacccggtggaggacctcgccgccacgtcggtgaccatctttcccaatgccgaactgggaggcccctttgaccagatgaacggagtggccggagatggcatgatcaacattgacatgactggagagaagaggtcgttggatctcccatatcccagcagctttgctcccgtctctgcacctagaaaccagaccttcacttacatgggcaagttctccattgaccctcagtaccctggtgccagctgctacccagaaggcataatcaatattgtgagtgcaggcatcttgcaaggggtcacttccccagcttcaaccacagcctcatccagcgtcacctctgcctcccccaacccactggccacaggacccctgggtgtgtgcaccatgtcccagacccagcctgacctggaccacctgtactctccgccaccgcctcctcctccttattctggctgtgcaggagacctctaccaggacccttctgcgttcctgtcagcagccaccacctccacctcttcctctctggcctacccaccacctccttcctatccatcccccaagccagccacggacccaggtctcttcccaatgatcccagactatcctggattctttccatctcagtgccagagagacctacatggtacagctggcccagaccgtaagccctttccctgcccactggacaccctgcgggtgccccctccactcactccactctctacaatccgtaactttaccctggggggccccagtgctggggtgaccggaccaggggccagtggaggcagcgagggaccccggctgcctggtagcagctcagcagcagcagcagccgccgccgccgccgcctataacccacaccacctgccactgcggcccattctgaggcctcgcaagtaccccaacagacccagcaagacgccggtgcacgagaggccctacccgtgcccagcagaaggctgcgaccggcggttctcccgctctgacgagctgacacggcacatccgaatccacactgggcataagcccttccagtgtcggatctgcatgcgcaacttcagccgcagtgaccacctcaccacccatatccgcacccacaccggtgagaagcccttcgcctgtgactactgtggccgaaagtttgcccggagtgatgagaggaagcgccacaccaagatccacctgagacagaaagagcggaaaagcagtgccccctctgcatcggtgccagccccctctacagcctcctgctctgggggcgtgcagcctgggggtaccctgtgcagcagtaacagcagcagtcttggcggagggccgctcgccccttgctcctctcggacccggacaccttgagatgagactcaggctgatacaccagctcccaaaggtcccggaggccctttgtccactggagctgcacaacaaacactaccaccctttcctgtccctctctccctttgttgggcaaagggctttggtggagctagcactgccccctttccacctagaagcaggttcttcctaaaacttagcccattctagtctctcttaggtgagttgactatcaacccaaggcaaaggggaggctcagaaggaggtggtgtggggatcccctggccaagagggctgaggtctgaccctgctttaaagggttgtttgactaggttttgctaccccacttccccttattttgacccatcacaggtttttgaccctggatgtcagagttgatctaagacgttttctacaataggttgggagatgctgatcccttcaagtggggacagcaaaaagacaagcaaaactgatgtgcactttatggcttgggactgatttgggggacattgtacagtgagtgaagtatagcctttatgccacactctgtggccctaaaatggtgaatcagagcatatctagttgtctcaacccttgaagcaatatgtattatatactcagagaacagaagtgcaatgtgatgggaggaacgtagcaatatctgctccttttcgagttgtttgagaaatgtaggctattttttcagtgtatatccactcagattttgtgtatttttgatgtacccacactgttctctaaattctgaatctttgggaaaaaatgtaaagcatttatgatctcagaggttaacttatttaagggggatgtacatattctctgaaactaggatgcatgcaattgtgttggaagtgtccttggtcgccttgtgtgatgtagacaaatgttacaaggctgcatgtaaatgggttgccttattatggagaaaaaaatcactccctgagtttagtatggctgtatatttatgcctattaatatttggaattttttttagaaagtatatttttgtatgctttgttttgtgacttaaaagtgttacctttgtagtcaaatttcagataagaatgtacataatgttaccggagctgatttgtttggtcattagctcttaatagttgtgaaaaaataaatctattctaacgcaaaaccactaactgaagttcagatataatggatggtttgtgactatagtgtaaataaatacttttcaacaat

SEQ ID NO: 21 - protein, 476 aa, Homo sapiens
MMTAKAVDKIPVTLSGFVHQLSDNIYPVEDLAATSVTIFPNAELGGPFDQMNGVAGDGMINIDMTGEKRSLDLPYPSSFAPVSAPRNQTFTYMGKFSIDPQYPGASCYPEGIINIVSAGILQGVTSPASTTASSSVTSASPNPLATGPLGVCTMSQTQPDLDHLYSPPPPPPPYSGCAGDLYQDPSAFLSAATTSTSSSLAYPPPPSYPSPKPATDPGLFPMIPDYPGFFPSQCQRDLHGTAGPDRKPFPCPLDTLRVPPPLTPLSTIRNFTLGGPSAGVTGPGASGGSEGPRLPGSSSAAAAAAAAAAYNPHHLPLRPILRPRKYPNRPSKTPVHERPYPCPAEGCDRRFSRSDELTRHIRIHTGHKPFQCRICMRNFSRSDHLTTHIRTHTGEKPFACDYCGRKFARSDERKRHTKIHLRQKERKSSAPSASVPAPSTASCSGGVQPGGTLCSSNSSSLGGGPLAPCSSRTRTP

SEQ ID NO: 22 - DNA, 2059 bp, Homo sapiens
ccgcaggcgctcggggttggagccagcgaccgtcggtagcagcatggctctcctctttctcctaccccttgtcatgcagggtgtgagcagggctgagatgggcaccgcggatctggggccgtcctcagtgcctacaccaactaatgttacaattgaatcctataacatgaaccctatcgtatattgggagtaccagatcatgccacaggtccctgtttttaccgtagaggtaaagaactatggtgttaagaattcagaatggattgatgcctgcatcaatatttctcatcattattgtaatatttctgatcatgttggtgatccatcaaattctctttgggtcagagttaaagccagggttggacaaaaagaatctgcctatgcaaagtcagaagaatttgctgtatgccgagatggaaaaattggaccacctaaactggatatcagaaaggaggagaagcaaatcatgattgacatatttcacccttcagtttttgtaaatggagacgagcaggaagtcgattatgatcccgaaactacctgttacattagggtgtacaatgtgtatgtgagaatgaacggaagtgagatccagtataaaatactcacgcagaaggaagatgattgtgacgagattcagtgccagttagcgattccagtatcctcactgaattctcagtactgtgtttcagcagaaggagtcttacatgtgtggggtgttacaactgaaaagtcaaaagaagtttgtattaccattttcaatagcagtataaaaggttctctttggattccagttgttgctgctttactactctttctagtgcttagcctggtattcatctgtttttatattaagaaaattaatccattgaaggaaaaaagcataatattacccaagtccttgatctctgtggtaagaagtgctactttagagacaaaacctgaatcaaaatatgtatcactcatcacgtcataccagccattttccttagaaaaggaggtggtctgtgaagagccgttgtctccagcaacagttccaggcatgcataccgaagacaatccaggaaaagtggaacatacagaagaactttctagtataacagaagtggtgactactgaagaaaatattcctgacgtggtcccgggcagccatctgactccaatagagagagagagttcttcacctttaagtagtaaccagtctgaacctggcagcatcgctttaaactcgtatcactccagaaattgttctgagagtgatcactccagaaatggttttgatactgattccagctgtctggaatcacatagctccttatctgactcagaatttcccccaaataataaaggtgaaataaaaacagaaggacaagagctcataaccgtaataaaagcccccacctcctttggttatgataaaccacatgtgctagtggatctacttgtggatgatagcggtaaagagtccttgattggttatagaccaacagaagattccaaagaattttcatgagatcagctaagttgcaccaactttgaagtctgattttcctggacagttttctgctttaatttcatgaaaagattatgatctcagaaattgtatcttagttggtatcaaccaaatggagtgacttagtgtacatgaaagcgtaaagaggatgtgtggcattttcacttttggcttgtaaagtacagacttttttttttttttaaacaaaaaaagcattgtaacttatgaacctttacatccagataggttaccagtaacggaacatatccagtactcctggttcctaggtgagcaggtgatgccccagggacctttgtagccacttcactttttttcttttctctgccttggtatagcatatgtgttttgtaagtttatgcatacagtaattttaagtaatttcagaagaaattctcgaagcttttcaaaattggacttaaaatctaattcaaactaatagaattaatggaatatgtaaatagaaacgtgtatattttttatgaaacattacagttagagatttttaaataaagaattttaaaactc

SEQ ID NO: 23 - protein, 489 aa, Homo sapiens
MALLFLLPLVMQGVSRAEMGTADLGPSSVPTPTNVTIESYNMNPIVYWEYQIMPQVPVFTVEVKNYGVKNSEWIDACINISHHYCNISDHVGDPSNSLWVRVKARVGQKESAYAKSEEFAVCRDGKIGPPKLDIRKEEKQIMIDIFHPSVFVNGDEQEVDYDPETTCYIRVYNVYVRMNGSEIQYKILTQKEDDCDEIQCQLAIPVSSLNSQYCVSAEGVLHVWGVTTEKSKEVCITIFNSSIKGSLWIPVVAALLLFLVLSLVFICFYIKKINPLKEKSIILPKSLISVVRSATLETKPESKYVSLITSYQPFSLEKEVVCEEPLSPATVPGMHTEDNPGKVEHTEELSSITEVVTTEENIPDVVPGSHLTPIERESSSPLSSNQSEPGSIALNSYHSRNCSESDHSRNGFDTDSSCLESHSSLSDSEFPPNNKGEIKTEGQELITVIKAPTSFGYDKPHVLVDLLVDDSGKESLIGYRPTEDSKEFS

SEQ ID NO: 24 - DNA, 2308 bp, Homo sapiens
gagagactggatggacccacaagggtgacagcccaggcggaccgatcttcccatcccacatcctccggcgcgatgccaaaaagaggctgacggcaactgggccttctgcagagaaagacctccgcttcactgccccggctggtcccaagggtcaggaagatggattcatacctgctgatgtggggactgctcacgttcatcatggtgcctggctgccaggcagagctctgtgacgatgacccgccagagatcccacacgccacattcaaagccatggcctacaaggaaggaaccatgttgaactgtgaatgcaagagaggtttccgcagaataaaaagcgggtcactctatatgctctgtacaggaaactctagccactcgtcctgggacaaccaatgtcaatgcacaagctctgccactcggaacacaacgaaacaagtgacacctcaacctgaagaacagaaagaaaggaaaaccacagaaatgcaaagtccaatgcagccagtggaccaagcgagccttccaggtcactgcagggaacctccaccatgggaaaatgaagccacagagagaatttatcatttcgtggtggggcagatggtttattatcagtgcgtccagggatacagggctctacacagaggtcctgctgagagcgtctgcaaaatgacccacgggaagacaaggtggacccagccccagctcatatgcacaggtgaaatggagaccagtcagtttccaggtgaagagaagcctcaggcaagccccgaaggccgtcctgagagtgagacttcctgcctcgtcacaacaacagattttcaaatacagacagaaatggctgcaaccatggagacgtccatatttacaacagagtaccaggtagcagtggccggctgtgttttcctgctgatcagcgtcctcctcctgagtgggctcacctggcagcggagacagaggaagagtagaagaacaatctagaaaaccaaaagaacaagaatttcttggtaagaagccgggaacagacaacagaagtcatgaagcccaagtgaaatcaaaggtgctaaatggtcgcccaggagacatccgttgtgcttgcctgcgttttggaagctctgaagtcacatcacaggacacggggcagtggcaaccttgtctctatgccagctcagtcccatcagagagcgagcgctacccacttctaaatagcaatttcgccgttgaagaggaagggcaaaaccactagaactctccatcttattttcatgtatatgtgttcattaaagcatgaatggtatggaactctctccaccctatatgtagtataaagaaaagtaggtttacattcatctcattccaacttcccagttcaggagtcccaaggaaagccccagcactaacgtaaatacacaacacacacactctaccctatacaactggacattgtctgcgtggttcctttctcagccgcttctgactgctgattctcccgttcacgttgcctaataaacatccttcaagaactctgggctgctacccagaaatcattttacccttggctcaatcctctaagctaacccccttctactgagccttcagtcttgaatttctaaaaaacagaggccatggcagaataatctttgggtaacttcaaaacggggcagccaaacccatgaggcaatgtcaggaacagaaggatgaatgaggtcccaggcagagaatcatacttagcaaagttttacctgtgcgttactaattggcctctttaagagttagtttctttgggattgctatgaatgataccctgaatttggcctgcactaatttgatgtttacaggtggacacacaaggtgcaaatcaatgcgtacgtttcctgagaagtgtctaaaaacaccaaaaagggatccgtacattcaatgtttatgcaaggaaggaaagaaagaaggaagtgaagagggagaagggatggaggtcacactggtagaacgtaaccacggaaaagagcgcatcaggcctggcacggtggctcaggcctataaccccagctccctaggagaccaaggcgggagcatctcttgaggccaggagtttgagaccagcctgggcagcatagcaagacacatccctacaaaaaattagaaattggctggatgtggtggcatacgcctgtagtcctagccactcaggaggctgaggcaggaggattgcttgagcccaggagttcgaggctgcagtcagtcatgatggcaccactgcactccagcctgggcaacagagcaagatcctgtctttaaggaaaaaaagacaagg

SEQ ID NO: 25 - protein, 272 aa, Homo sapiens
MDSYLLMWGLLTFIMVPGCQAELCDDDPPEIPHATFKAMAYKEGTMLNCECKRGFRRIKSGSLYMLCTGNSSHSSWDNQCQCTSSATRNTTKQVTPQPEEQKERKTTEMQSPMQPVDQASLPGHCREPPPWENEATERIYHFVVGQMVYYQCVQGYRALHRGPAESVCKMTHGKTRWTQPQLICTGEMETSQFPGEEKPQASPEGRPESETSCLVTTTDFQIQTEMAATMETSIFTTEYQVAVAGCVFLLISVLLLSGLTWQRRQRKSRRTI

SEQ ID NO: 26 - DNA, 3597 bp, Homo sapiens
ggcgaatggagcaggggcgcgcagataattaaagatttacacacagctggaagaaatcatagagaagccgggcgtggtggctcatgcctataatcccagcacttttggaggctgaggcgggcagatcacttgagatcaggagttcgagaccagcctggtgccttggcatctcccaatggggtggctttgctctgggctcctgttccctgtgagctgcctggtcctgctgcaggtggcaagctctgggaacatgaaggtcttgcaggagcccacctgcgtctccgactacatgagcatctctacttgcgagtggaagatgaatggtcccaccaattgcagcaccgagctccgcctgttgtaccagctggtttttctgctctccgaagcccacacgtgtatccctgagaacaacggaggcgcggggtgcgtgtgccacctgctcatggatgacgtggtcagtgcggataactatacactggacctgtgggctgggcagcagctgctgtggaagggctccttcaagcccagcgagcatgtgaaacccagggccccaggaaacctgacagttcacaccaatgtctccgacactctgctgctgacctggagcaacccgtatccccctgacaattacctgtataatcatctcacctatgcagtcaacatttggagtgaaaacgacccggcagatttcagaatctataacgtgacctacctagaaccctccctccgcatcgcagccagcaccctgaagtctgggatttcctacagggcacgggtgagggcctgggctcagtgctataacaccacctggagtgagtggagccccagcaccaagtggcacaactcctacagggagcccttcgagcagcacctcctgctgggcgtcagcgtttcctgcattgtcatcctggccgtctgcctgttgtgctatgtcagcatcaccaagattaagaaagaatggtgggatcagattcccaacccagcccgcagccgcctcgtggctataataatccaggatgctcaggggtcacagtgggagaagcggtcccgaggccaggaaccagccaagtgcccacactggaagaattgtcttaccaagctcttgccctgttttctggagcacaacatgaaaagggatgaagatcctcacaaggctgccaaagagatgcctttccagggctctggaaaatcagcatggtgcccagtggagatcagcaagacagtcctctggccagagagcatcagcgtggtgcgatgtgtggagttgtttgaggccccggtggagtgtgaggaggaggaggaggtagaggaagaaaaagggagcttctgtgcatcgcctgagagcagcagggatgacttccaggagggaagggagggcattgtggcccggctaacagagagcctgttcctggacctgctcggagaggagaatgggggcttttgccagcaggacatgggggagtcatgccttcttccaccttcgggaagtacgagtgctcacatgccctgggatgagttcccaagtgcagggcccaaggaggcacctccctggggcaaggagcagcctctccacctggagccaagtcctcctgccagcccgacccagagtccagacaacctgacttgcacagagacgcccctcgtcatcgcaggcaaccctgcttaccgcagcttcagcaactccctgagccagtcaccgtgtcccagagagctgggtccagacccactgctggccagacacctggaggaagtagaacccgagatgccctgtgtcccccagctctctgagccaaccactgtgccccaacctgagccagaaacctgggagcagatcctccgccgaaatgtcctccagcatggggcagctgcagcccccgtctcggcccccaccagtggctatcaggagtttgtacatgcggtggagcagggtggcacccaggccagtgcggtggtgggcttgggtcccccaggagaggctggttacaaggccttctcaagcctgcttgccagcagtgctgtgtccccagagaaatgtgggtttggggctagcagtggggaagaggggtataagcctttccaagacctcattcctggctgccctggggaccctgccccagtccctgtccccttgttcacctttggactggacagggagccacctcgcagtccgcagagctcacatctcccaagcagctccccagagcacctgggtctggagccgggggaaaaggtagaggacatgccaaagcccccacttccccaggagcaggccacagacccccttgtggacagcctgggcagtggcattgtctactcagcccttacctgccacctgtgcggccacctgaaacagtgtcatggccaggaggatggtggccagacccctgtcatggccagtccttgctgtggctgctgctgtggagacaggtcctcgccccctacaacccccctgagggccccagacccctctccaggtggggttccactggaggccagtctgtgtccggcctccctggcaccctcgggcatctcagagaagagtaaatcctcatcatccttccatcctgcccctggcaatgctcagagctcaagccagacccccaaaatcgtgaactttgtctccgtgggacccacatacatgagggtctcttaggtgcatgtcctcttgttgctgagtctgcagatgaggactagggcttatccatgcctgggaaatgccacctcctggaaggcagccaggctggcagatttccaaaagacttgaagaaccatggtatgaaggtgattggccccactgacgttggcctaacactgggctgcagagactggaccccgcccagcattgggctgggctcgccacatcccatgagagtagagggcactgggtcgccgtgccccacggcaggcccctgcaggaaaactgaggcccttgggcacctcgacttgtgaacgagttgttggctgctccctccacagcttctgcagcagactgtccctgttgtaactgcccaaggcatgttttgcccaccagatcatggcccacgtggaggcccacctgcctctgtctcactgaactagaagccgagcctagaaactaacacagccatcaagggaatgacttgggcggccttgggaaatcgatgagaaattgaacttcagggagggtggtcattgcctagaggtgctcattcatttaacagagcttccttaggttgatgctggaggcagaatcccggctgtcaaggggtgttcagttaaggggagcaacagaggacatgaaaaattgctatgactaaagcagggacaatttgctgccaaacacccatgcccagctgtatggctgggggctcctcgtatgcatggaacccccagaataaatatgctcagccaccctgtgggccgggcaatccagacagcaggcataaggcaccagttaccctgcatgttggcccagacctcaggtgctagggaaggcgggaaccttgggttgagtaatgctcgtctgtgtgttttagtttcatcacctgttatctgtgtttgctgaggagagtggaacagaaggggtggagttttgtataaataaagtttctttgtctc

SEQ ID NO: 27 - protein, 825 aa, Homo sapiens
MGWLCSGLLFPVSCLVLLQVASSGNMKVLQEPTCVSDYMSISTCEWKMNGPTNCSTELRLLYQLVFLLSEAHTCIPENNGGAGCVCHLLMDDVVSADNYTLDLWAGQQLLWKGSFKPSEHVKPRAPGNLTVHTNVSDTLLLTWSNPYPPDNYLYNHLTYAVNIWSENDPADFRIYNVTYLEPSLRIAASTLKSGISYRARVRAWAQCYNTTWSEWSPSTKWHNSYREPFEQHLLLGVSVSCIVILAVCLLCYVSITKIKKEWWDQIPNPARSRLVAIIIQDAQGSQWEKRSRGQEPAKCPHWKNCLTKLLPCFLEHNMKRDEDPHKAAKEMPFQGSGKSAWCPVEISKTVLWPESISVVRCVELFEAPVECEEEEEVEEEKGSFCASPESSRDDFQEGREGIVARLTESLFLDLLGEENGGFCQQDMGESCLLPPSGSTSAHMPWDEFPSAGPKEAPPWGKEQPLHLEPSPPASPTQSPDNLTCTETPLVIAGNPAYRSFSNSLSQSPCPRELGPDPLLARHLEEVEPEMPCVPQLSEPTTVPQPEPETWEQILRRNVLQHGAAAAPVSAPTSGYQEFVHAVEQGGTQASAVVGLGPPGEAGYKAFSSLLASSAVSPEKCGFGASSGEEGYKPFQDLIPGCPGDPAPVPVPLFTFGLDREPPRSPQSSHLPSSSPEHLGLEPGEKVEDMPKPPLPQEQATDPLVDSLGSGIVYSALTCHLCGHLKQCHGQEDGGQTPVMASPCCGCCCGDRSSPPTTPLRAPDPSPGGVPLEASLCPASLAPSGISEKSKSSSSFHPAPGNAQSSSQTPKIVNFVSVGPTYMRVS

SEQ ID NO: 28 - DNA, 1386 bp, Homo sapiens
gccccatctccttgggctgcccgtgcttcgtgctttggactaccgcccagcagtgtcctgccctctgcctgggcctcggtccctcctgcacctgctgcctggatccccggcctgcctgggcctgggccttggttctccccatgacaccacctgaacgtctcttcctcccaagggtgtgtggcaccaccctacacctcctccttctggggctgctgctggttctgctgcctggggcccaggggctccctggtgttggcctcacaccttcagctgcccagactgcccgtcagcaccccaagatgcatcttgcccacagcaccctcaaacctgctgctcacctcattggagaccccagcaagcagaactcactgctctggagagcaaacacggaccgtgccttcctccaggatggtttctccttgagcaacaattctctcctggtccccaccagtggcatctacttcgtctactcccaggtggtcttctctgggaaagcctactctcccaaggccacctcctccccactctacctggcccatgaggtccagctcttctcctcccagtaccccttccatgtgcctctcctcagctcccagaagatggtgtatccagggctgcaggaaccctggctgcactcgatgtaccacggggctgcgttccagctcacccagggagaccagctatccacccacacagatggcatcccccacctagtcctcagccctagtactgtcttctttggagccttcgctctgtagaacttggaaaaatccagaaagaaaaaataattgatttcaagaccttctccccattctgcctccattctgaccatttcaggggtcgtcaccacctctcctttggccattccaacagctcaagtcttccctgatcaagtcaccggagctttcaaagaaggaattctaggcatcccaggggaccacacctccctgaaccatccctgatgtctgtctggctgaggatttcaagcctgcctaggaattcccagcccaaagctgttggtctgtcccaccagctaggtggggcctagatccacacacagaggaagagcaggcacatggaggagcttgggggatgactagaggcagggaggggactatttatgaaggcaaaaaaattaaattatttatttatggaggatggagagaggggaataatagaagaacatccaaggagaaacagagacaggcccaagagatgaagagtgagagggcatgcgcacaaggctgaccaagagagaaagaagtaggcatgagggatcacagggccccagaaggcagggaaaggctctgaaagccagctgccgaccagagccccacacggaggcatctgcaccctcgatgaagcccaataaacctcttttctctg

SEQ ID NO: 29 - protein, 205 aa, Homo sapiens
MTPPERLFLPRVCGTTLHLLLLGLLLVLLPGAQGLPGVGLTPSAAQTARQHPKMHLAHSTLKPAAHLIGDPSKQNSLLWRANTDRAFLQDGFSLSNNSLLVPTSGIYFVYSQVVFSGKAYSPKATSSPLYLAHEVQLFSSQYPFHVPLLSSQKMVYPGLQEPWLHSMYHGAAFQLTQGDQLSTHTDGIPHLVLSPSTVFFGAFAL

SEQ ID NO: 30 - DNA, 1125 bp, Homo sapiens
ttctgccctcgagcccaccgggaacgaaagagaagctctatctcgcctccaggagcccagctatgaactccttctccacaagcgccttcggtccagttgccttctccctggggctgctcctggtgttgcctgctgccttccctgccccagtacccccaggagaagattccaaagatgtagccgccccacacagacagccactcacctcttcagaacgaattgacaaacaaattcggtacatcctcgacggcatctcagccctgagaaaggagacatgtaacaagagtaacatgtgtgaaagcagcaaagaggcactggcagaaaacaacctgaaccttccaaagatggctgaaaaagatggatgcttccaatctggattcaatgaggagacttgcctggtgaaaatcatcactggtcttttggagtttgaggtatacctagagtacctccagaacagatttgagagtagtgaggaacaagccagagctgtgcagatgagtacaaaagtcctgatccagttcctgcagaaaaaggcaaagaatctagatgcaataaccacccctgacccaaccacaaatgccagcctgctgacgaagctgcaggcacagaaccagtggctgcaggacatgacaactcatctcattctgcgcagctttaaggagttcctgcagtccagcctgagggctcttcggcaaatgtagcatgggcacctcagattgttgttgttaatgggcattccttcttctggtcagaaacctgtccactgggcacagaacttatgttgttctctatggagaactaaaagtatgagcgttaggacactattttaattatttttaatttattaatatttaaatatgtgaagctgagttaatttatgtaagtcatatttatatttttaagaagtaccacttgaaacattttatgtattagttttgaaataataatggaaagtggctatgcagtttgaatatcctttgtttcagagccagatcatttcttggaaagtgtaggcttacctcaaataaatggctaacttatacatatttttaaagaaatatttatattgtatttatataatgtataaatggtttttataccaataaatggcattttaaaaaattc

SEQ ID NO: 31 - protein, 212 aa, Homo sapiens
MNSFSTSAFGPVAFSLGLLLVLPAAFPAPVPPGEDSKDVAAPHRQPLTSSERIDKQIRYILDGISALRKETCNKSNMCESSKEALAENNLNLPKMAEKDGCFQSGFNEETCLVKIITGLLEFEVYLEYLQNRFESSEEQARAVQMSTKVLIQFLQKKAKNLDAITTPDPTTNASLLTKLQAQNQWLQDMTTHLILRSFKEFLQSSLRALRQM

SEQ ID NO: 32 - DNA, 1979 bp, Homo sapiens
caggactgcctgagacaagccacaagctgaacagagaaagtggattgaacaaggacgcatttccccagtacatccacaacatgctgtccacatctcgttctcggtttatcagaaataccaacgagagcggtgaagaagtcaccaccttttttgattatgattacggtgctccctgtcataaatttgacgtgaagcaaattggggcccaactcctgcctccgctctactcgctggtgttcatctttggttttgtgggcaacatgctggtcgtcctcatcttaataaactgcaaaaagctgaagtgcttgactgacatttacctgctcaacctggccatctctgatctgctttttcttattactctcccattgtgggctcactctgctgcaaatgagtgggtctttgggaatgcaatgtgcaaattattcacagggctgtatcacatcggttattttggcggaatcttcttcatcatcctcctgacaatcgatagatacctggctattgtccatgctgtgtttgctttaaaagccaggacggtcacctttggggtggtgacaagtgtgatcacctggttggtggctgtgtttgcttctgtcccaggaatcatctttactaaatgccagaaagaagattctgtttatgtctgtggcccttattttccacgaggatggaataatttccacacaataatgaggaacattttggggctggtcctgccgctgctcatcatggtcatctgctactcgggaatcctgaaaaccctgcttcggtgtcgaaacgagaagaagaggcatagggcagtgagagtcatcttcaccatcatgattgtttactttctcttctggactccctataacattgtcattctcctgaacaccttccaggaattcttcggcctgagtaactgtgaaagcaccagtcaactggaccaagccacgcaggtgacagagactcttgggatgactcactgctgcatcaatcccatcatctatgccttcgttggggagaagttcagaaggtatctctcggtgttcttccgaaagcacatcaccaagcgcttctgcaaacaatgtccagttttctacagggagacagtggatggagtgacttcaacaaacacgccttccactggggagcaggaagtctcggctggtttataaaacgaggagcagtttgattgttgtttataaagggagataacaatctgtatataacaacaaacttcaagggtttgttgaacaatagaaacctgtaaagcaggtgcccaggaacctcagggctgtgtgtactaatacagactatgtcacccaatgcatatccaacatgtgctcagggaataatccagaaaaactgtgggtagagactttgactctccagaaagctcatctcagctcctgaaaaatgcctcattaccttgtgctaatcctctttttctagtcttcataatttcttcactcaatctctgattctgtcaatgtcttgaaatcaagggccagctggaggtgaagaagagaatgtgacaggcacagatgaatgggagtgagggatagtggggtcagggctgagaggagaaggagggagacatgagcatggctgagcctggacaaagacaaaggtgagcaaagggctcacgcattcagccaggagatgatactggtccttagccccatctgccacgtgtatttaaccttgaagggttcaccaggtcagggagagtttgggaactgcaataacctgggagttttggtggagtccgatgattctcttttgcataagtgcatgacatatttttgctttattacagtttatctatggcacccatgcaccttacatttgaaatctatgaaatatcatgctccattgttcagatgcttcttaggccacatccccctgtctaaaaattcagaaaatttttgtttataaaagatgcattatctatgatatgctaatatatgtatatgcaatataaaatttag

SEQ ID NO: 33 - protein, 360 aa, Homo sapiens
MLSTSRSRFIRNTNESGEEVTTFFDYDYGAPCHKFDVKQIGAQLLPPLYSLVFIFGFVGNMLVVLILINCKKLKCLTDIYLLNLAISDLLFLITLPLWAHSAANEWVFGNAMCKLFTGLYHIGYFGGIFFIILLTIDRYLAIVHAVFALKARTVTFGVVTSVITWLVAVFASVPGIIFTKCQKEDSVYVCGPYFPRGWNNFHTIMRNILGLVLPLLIMVICYSGILKTLLRCRNEKKRHRAVRVIFTIMIVYFLFWTPYNIVILLNTFQEFFGLSNCESTSQLDQATQVTETLGMTHCCINPIIYAFVGEKFRRYLSVFFRKHITKRFCKQCPVFYRETVDGVTSTNTPSTGEQEVSAGL

SEQ ID NO: 34 - DNA, 2202 bp, Homo sapiens
ggaaacatgatccagctgaaggactgattgcaggaaaacttggcagctccccaaccttggtggcccagggagtgtgaggctgcagcctcagaaggtgtgagcagtggccacgagaggcaggctggctgggacatgaggttggcagagggcaggcaagctggcccttggtgggcctcgccctgagcactcggaggcactcctatgcttggaaagctcgctatgctgctgtgggtccagcaggcgctgctcgccttgctcctccccacactcctggcacagggagaagccaggaggagccgaaacaccaccaggcccgctctgctgaggctgtcggattaccttttgaccaactacaggaagggtgtgcgccccgtgagggactggaggaagccaaccaccgtatccattgacgtcattgtctatgccatcctcaacgtggatgagaagaatcaggtgctgaccacctacatctggtaccggcagtactggactgatgagtttctccagtggaaccctgaggactttgacaacatcaccaagttgtccatccccacggacagcatctgggtcccggacattctcatcaatgagttcgtggatgtggggaagtctccaaatatcccgtacgtgtatattcggcatcaaggcgaagttcagaactacaagccccttcaggtggtgactgcctgtagcctcgacatctacaacttccccttcgatgtccagaactgctcgctgaccttcaccagttggctgcacaccatccaggacatcaacatctctttgtggcgcttgccagaaaaggtgaaatccgacaggagtgtcttcatgaaccagggagagtgggagttgctgggggtgctgccctactttcgggagttcagcatggaaagcagtaactactatgcagaaatgaagttctatgtggtcatccgccggcggcccctcttctatgtggtcagcctgctactgcccagcatcttcctcatggtcatggacatcgtgggcttctacctgccccccaacagtggcgagagggtctctttcaagattacactcctcctgggctactcggtcttcctgatcatcgtttctgacacgctgccggccactgccatcggcactcctctcattggtgtctactttgtggtgtgcatggctctgctggtgataagtttggccgagaccatcttcattgtgcggctggtgcacaagcaagacctgcagcagcccgtgcctgcttggctgcgtcacctggttctggagagaatcgcctggctactttgcctgagggagcagtcaacttcccagaggcccccagccacctcccaagccaccaagactgatgactgctcagccatgggaaaccactgcagccacatgggaggaccccaggacttcgagaagagcccgagggacagatgtagccctcccccaccacctcgggaggcctcgctggcggtgtgtgggctgctgcaggagctgtcctccatccggcaattcctggaaaagcgggatgagatccgagaggtggcccgagactggctgcgcgtgggctccgtgctggacaagctgctattccacatttacctgctagcggtgctggcctacagcatcaccctggttatgctctggtccatctggcagtacgcttgagtgggtacagcccagtggaggagggggtacagtcctggttaggtggggacagaggatttctgcttaggcccctcaggacccagggaatgccagggacattttcaagacacagacaaagtcccgtgccctgtttccaatgccaattcatctcagcaatcacaagccaaggtctgaacccttccaccaaaaactgggtgttcaaggcccttacacccttgtcccacccccagcagctcaccatggctttaaaacatgctctcttagatcaggagaaactcgggcactccctaagtccactctagttgtggacttttccccattgaccctcacctgaataagggactttggaattctgcttctctttcacaactttgcttttaggttgaaggcaaaaccaactctctactacacaggcctgataactctgtacgaggcttctctaacccctagtgtcttttttttcttcacctcacttgtggcagcttccctgaacactcatcccccatcagatgatgggagtgggaagaataaaatgcagtgaaaccc

SEQ ID NO: 35 - protein, 478 aa, Homo sapiens
MLLWVQQALLALLLPTLLAQGEARRSRNTTRPALLRLSDYLLTNYRKGVRPVRDWRKPTTVSIDVIVYAILNVDEKNQVLTTYIWYRQYWTDEFLQWNPEDFDNITKLSIPTDSIWVPDILINEFVDVGKSPNIPYVYIRHQGEVQNYKPLQVVTACSLDIYNFPFDVQNCSLTFTSWLHTIQDINISLWRLPEKVKSDRSVFMNQGEWELLGVLPYFREFSMESSNYYAEMKFYVVIRRRPLFYVVSLLLPSIFLMVMDIVGFYLPPNSGERVSFKITLLLGYSVFLIIVSDTLPATAIGTPLIGVYFVVCMALLVISLAETIFIVRLVHKQDLQQPVPAWLRHLVLERIAWLLCLREQSTSQRPPATSQATKTDDCSAMGNHCSHMGGPQDFEKSPRDRCSPPPPPREASLAVCGLLQELSSIRQFLEKRDEIREVARDWLRVGSVLDKLLFHIYLLAVLAYSITLVMLWSIWQYA

SEQ ID NO: 36 - DNA, 3683 bp, Homo sapiens
gcgagcgcagcggagcctggagagaaggcgctgggctgcgagggcgcgagggcgcgagggcagggggcaaccggaccccgcccgcacccatggcgcccgtcgccgtctgggccgcgctggccgtcggactggagctctgggctgcggcgcacgccttgcccgcccaggtggcatttacaccctacgccccggagcccgggagcacatgccggctcagagaatactatgaccagacagctcagatgtgctgcagcaaatgctcgccgggccaacatgcaaaagtcttctgtaccaagacctcggacaccgtgtgtgactcctgtgaggacagcacatacacccagctctggaactgggttcccgagtgcttgagctgtggctcccgctgtagctctgaccaggtggaaactcaagcctgcactcgggaacagaaccgcatctgcacctgcaggcccggctggtactgcgcgctgagcaagcaggaggggtgccggctgtgcgcgccgctgcgcaagtgccgcccgggcttcggcgtggccagaccaggaactgaaacatcagacgtggtgtgcaagccctgtgccccggggacgttctccaacacgacttcatccacggatatttgcaggccccaccagatctgtaacgtggtggccatccctgggaatgcaagcatggatgcagtctgcacgtccacgtcccccacccggagtatggccccaggggcagtacacttaccccagccagtgtccacacgatcccaacacacgcagccaactccagaacccagcactgctccaagcacctccttcctgctcccaatgggccccagccccccagctgaagggagcactggcgacttcgctcttccagttggactgattgtgggtgtgacagccttgggtctactaataataggagtggtgaactgtgtcatcatgacccaggtgaaaaagaagcccttgtgcctgcagagagaagccaaggtgcctcacttgcctgccgataaggcccggggtacacagggccccgagcagcagcacctgctgatcacagcgccgagctccagcagcagctccctggagagctcggccagtgcgttggacagaagggcgcccactcggaaccagccacaggcaccaggcgtggaggccagtggggccggggaggcccgggccagcaccgggagctcagattcttcccctggtggccatgggacccaggtcaatgtcacctgcatcgtgaacgtctgtagcagctctgaccacagctcacagtgctcctcccaagccagctccacaatgggagacacagattccagcccctcggagtccccgaaggacgagcaggtccccttctccaaggaggaatgtgcctttcggtcacagctggagacgccagagaccctgctggggagcaccgaagagaagcccctgccccttggagtgcctgatgctgggatgaagcccagttaaccaggccggtgtgggctgtgtcgtagccaaggtgggctgagccctggcaggatgaccctgcgaaggggccctggtccttccaggcccccaccactaggactctgaggctctttctgggccaagttcctctagtgccctccacagccgcagcctccctctgacctgcaggccaagagcagaggcagcgagttggggaaagcctctgctgccatggtgtgtccctctcggaaggctggctgggcatggacgttcggggcatgctggggcaagtccctgactctctgtgacctgccccgcccagctgcacctgccagcctggcttctggagcccttgggttttttgtttgtttgtttgtttgtttgtttgtttctccccctgggctctgcccagctctggcttccagaaaaccccagcatccttttctgcagaggggctttctggagaggagggatgctgcctgagtcacccatgaagacaggacagtgcttcagcctgaggctgagactgcgggatggtcctggggctctgtgtagggaggaggtggcagccctgtagggaacggggtccttcaagttagctcaggaggcttggaaagcatcacctcaggccaggtgcagtggctcacgcctatgatcccagcactttgggaggctgaggcgggtggatcacctgaggttaggagttcgagaccagcctggccaacatggtaaaaccccatctctactaaaaatacagaaattagccgggcgtggtggcgggcacctatagtcccagctactcagaagcctgaggctgggaaatcgtttgaacccgggaagcggaggttgcagggagccgagatcacgccactgcactccagcctgggcgacagagcgagagtctgtctcaaaagaaaaaaaaaaaagcaccgcctccaaatgctaacttgtccttttgtaccatggtgtgaaagtcagatgcccagagggcccaggcaggccaccatattcagtgctgtggcctgggcaagataacgcacttctaactagaaatctgccaattttttaaaaaagtaagtaccactcaggccaacaagccaacgacaaagccaaactctgccagccacatccaaccccccacctgccatttgcaccctccgccttcactccggtgtgcctgcagccccgcgcctccttccttgctgtcctaggccacaccatctcctttcagggaatttcaggaactagagatgactgagtcctcgtagccatctctctactcctacctcagcctagaccctcctcctcccccagaggggtgggttcctcttccccactccccaccttcaattcctgggccccaaacgggctgccctgccactttggtacatggccagtgtgatcccaagtgccagtcttgtgtctgcgtctgtgttgcgtgtcgtgggtgtgtgtagccaaggtcggtaagttgaatggcctgccttgaagccactgaagctgggattcctccccattagagtcagccttccccctcccagggccagggccctgcagaggggaaaccagtgtagccttgcccggattctgggaggaagcaggttgaggggctcctggaaaggctcagtctcaggagcatggggataaaggagaaggcatgaaattgtctagcagagcaggggcagggtgataaattgttgataaattccactggacttgagcttggcagctgaactattggagggtgggagagcccagccattaccatggagacaagaagggttttccaccctggaatcaagatgtcagactggctggctgcagtgacgtgcacctgtactcaggaggctgaggggaggatcactggagcccaggagtttgaggctgcagcgagctatgatcgcgccactacactccagcctgagcaacagagtgagaccctgtctcttaaagaaaaaaaaagtcagactgctgggactggccaggtttctgcccacattggacccacatgaggacatgatggagcgcacctgccccctggtggacagtcctgggagaacctcaggcttccttggcatcacagggcagagccgggaagcgatgaatttggagactctgtggggccttggttcccttgtgtgtgtgtgttgatcccaagacaatgaaagtttgcactgtatgctggacggcattcctgcttatcaataaacctgtttgttttaaaaaaaa

SEQ ID NO: 37 - protein, 461 aa, Homo sapiens
MAPVAVWAALAVGLELWAAAHALPAQVAFTPYAPEPGSTCRLREYYDQTAQMCCSKCSPGQHAKVFCTKTSDTVCDSCEDSTYTQLWNWVPECLSCGSRCSSDQVETQACTREQNRICTCRPGWYCALSKQEGCRLCAPLRKCRPGFGVARPGTETSDVVCKPCAPGTFSNTTSSTDICRPHQICNVVAIPGNASMDAVCTSTSPTRSMAPGAVHLPQPVSTRSQHTQPTPEPSTAPSTSFLLPMGPSPPAEGSTGDFALPVGLIVGVTALGLLIIGVVNCVIMTQVKKKPLCLQREAKVPHLPADKARGTQGPEQQHLLITAPSSSSSSLESSASALDRRAPTRNQPQAPGVEASGAGEARASTGSSDSSPGGHGTQVNVTCIVNVCSSSDHSSQCSSQASSTMGDTDSSPSESPKDEQVPFSKEECAFRSQLETPETLLGSTEEKPLPLGVPDAGMKPS

SEQ ID NO: 38 - DNA, 1105 bp, Homo sapiens
gggcgggtagtcgaccgtgtccgcgcgcctgggagacgctgcctcggcccggacgcgcccgcgcccccgcggctggagggtggtcgccactgggacactgtgaaccaggagtgagtcggagctgccgcgctgcccaggccatggactgtgaggtcaacaacggttccagcctcagggatgagtgcatcacaaacctactggtgtttggcttcctccaaagctgttctgacaacagcttccgcagagagctggacgcactgggccacgagctgccagtgctggctccccagtgggagggctacgatgagctgcagactgatggcaaccgcagcagccactcccgcttgggaagaatagaggcagattctgaaagtcaagaagacatcatccggaatattgccaggcacctcgcccaggtcggggacagcatggaccgtagcatccctccgggcctggtgaacggcctggccctgcagctcaggaacaccagccggtcggaggaggaccggaacagggacctggccactgccctggagcagctgctgcaggcctaccctagagacatggagaaggagaagaccatgctggtgctggccctgctgctggccaagaaggtggccagtcacacgccgtccttgctccgtgatgtctttcacacaacagtgaattttattaaccagaacctacgcacctacgtgaggagcttagccagaaatgggatggactgaacggacagttccagaagtgtgactggctaaagcttgatgtggtcacagctgtatagctgcttccagtgtagacggagccctggcatgtcaacagcgttcctagagaagacaggctggaagatagctgtgacttctattttaaagacaatgttaaacttataacccactttaaaatatctacattaatatacttgaatgaaaatgtccatttacacgtatttgaatggccttcatatcatccacacatgaatctgcacatctgtaaatctacacacggtgcctttatttccactgtgcaggttcccacttaaaaattaaattggaaagcaggtttcaaggaagtagaaacaaaatacaatttttttggtaaaaaaaaa

SEQ ID NO: 39 - protein, 195 aa, Homo sapiens
MDCEVNNGSSLRDECITNLLVFGFLQSCSDNSFRRELDALGHELPVLAPQWEGYDELQTDGNRSSHSRLGRIEADSESQEDIIRNIARHLAQVGDSMDRSIPPGLVNGLALQLRNTSRSEEDRNRDLATALEQLLQAYPRDMEKEKTMLVLALLLAKKVASHTPSLLRDVFHTTVNFINQNLRTYVRSLARNGMD

SEQ ID NO: 40 - DNA, 1157 bp, Homo sapiens
gtcagcagaggcctcgctcgggcgcccagtggtcctgccgcctggtctcacctcgctatggttcgtctgcctctgcagtgcgtcctctggggctgcttgctgaccgctgtccatccagaaccacccactgcatgcagagaaaaacagtacctaataaacagtcagtgctgttctttgtgccagccaggacagaaactggtgagtgactgcacagagttcactgaaacggaatgccttccttgcggtgaaagcgaattcctagacacctggaacagagagacacactgccaccagcacaaatactgcgaccccaacctagggcttcgggtccagcagaagggcacctcagaaacagacaccatctgcacctgtgaagaaggctggcactgtacgagtgaggcctgtgagagctgtgtcctgcaccgctcatgctcgcccggctttggggtcaagcagattgctacaggggtttctgataccatctgcgagccctgcccagtcggcttcttctccaatgtgtcatctgctttcgaaaaatgtcacccttggacaagctgtgagaccaaagacctggttgtgcaacaggcaggcacaaacaagactgatgttgtctgtggtccccaggatcggctgagagccctggtggtgatccccatcatcttcgggatcctgtttgccatcctcttggtgctggtctttatcaaaaaggtggccaagaagccaaccaataaggccccccaccccaagcaggaaccccaggagatcaattttcccgacgatcttcctggctccaacactgctgctccagtgcaggagactttacatggatgccaaccggtcacccaggaggatggcaaagagagtcgcatctcagtgcaggagagacagtgaggctgcacccacccaggagtgtggccacgtgggcaaacaggcagttggccagagagcctggtgctgctgctgctgtggcgtgagggtgaggggctggcactgactgggcatagctccccgcttctgcctgcacccctgcagtttgagacaggagacctggcactggatgcagaaacagttcaccttgaagaacctctcacttcaccctggagcccatccagtctcccaacttgtattaaagacagaggcagaaaaaaaaaaaaaaa

SEQ ID NO: 41 - protein, 277 aa, Homo sapiens
MVRLPLQCVLWGCLLTAVHPEPPTACREKQYLINSQCCSLCQPGQKLVSDCTEFTETECLPCGESEFLDTWNRETHCHQHKYCDPNLGLRVQQKGTSETDTICTCEEGWHCTSEACESCVLHRSCSPGFGVKQIATGVSDTICEPCPVGFFSNVSSAFEKCHPWTSCETKDLVVQQAGTNKTDVVCGPQDRLRALVVIPIIFGILFAILLVLVFIKKVAKKPTNKAPHPKQEPQEINFPDDLPGSNTAAPVQETLHGCQPVTQEDGKESRISVQERQ

SEQ ID NO: 42 - DNA, 2409 bp, Homo sapiens
atgcggggcgtgtggccgcccccggtgtccgccctgctgtcggcgctggggatgtcgacgtacaagcgggccacgctggacgaggaggacctggtggactcgctctccgagggcgacgcataccccaacggcctgcaggtgaacttccacagcccccggagtggccagaggtgctgggctgcacggacccaggtggagaagcggctggtggtgttggtggtacttctggcggcaggactggtggcctgcttggcagcactgggcatccagtaccagacaagatccccctctgtgtgcctgagcgaagcttgtgtctcagtgaccagctccatcttgagctccatggaccccacagtggacccctgccatgacttcttcagctacgcctgtgggggctggatcaaggccaacccagtccctgatggccactcacgctgggggaccttcagcaacctctgggaacacaaccaagcaatcatcaagcacctcctcgaaaactccacggccagcgtgagcgaggcagagagaaaggcgcaagtatactaccgtgcgtgcatgaacgagaccaggatcgaggagctcagggccaaacctctaatggagttgattgagaggctcgggggctggaacatcacaggtccctgggccaaggacaacttccaggacaccctgcaggtggtcaccgcccactaccgcacctcacccttcttctctgtctatgtcagtgccgattccaagaactccaacagcaacgtgatccaggtggaccagtctggcctgggcttgccctcgagagactattacctgaacaaaactgaaaacgagaaggtgctgaccggatatctgaactacatggtccagctggggaagctgctgggcggcggggacgaggaggccatccggccccagatgcagcagatcttggactttgagacggcactggccaacatcaccatcccacaggagaagcgccgtgatgaggagctcatctaccacaaagtgacggcagccgagctgcagaccttggcacccgccatcaactggttgccttttctcaacaccatcttctaccccgtggagatcaatgaatccgagcctattgtggtctatgacaaggaataccttgagcagatctccactctcatcaacaccaccgacagatgcctgctcaacaactacatgatctggaacctggtgcggaaaacaagctccttccttgaccagcgctttcaggacgccgatgagaagttcatggaagtcatgtacgggaccaagaagacctgtcttcctcgctggaagttttgcgtgagtgacacagaaaacaacctgggctttgcgttgggccccatgtttgtcaaagcaaccttcgccgaggacagcaagagcatagccaccgagatcatcctggagattaagaaggcatttgaggaaagcctgagcaccctgaagtggatggatgaggaaacccgaaaatcagccaaggaaaaggccgatgccatctacaacatgataggataccccaacttcatcatggatcccaaggagctggacaaagtgtttaatgactacactgcagttccagacctctactttgaaaatgccatgcggtttttcaacttctcatggagggtcactgccgatcagctcaggaaagcccccaacagagatcagtggagcatgaccccgcccatggtgaacgcctactactcgcccaccaagaatgagattgtgtttccggccgggatcctgcaggcaccattctacacacgctcctcacccaaggccttaaactttggtggcataggtgtcgtcgtgggccatgagctgactcatgcttttgatgatcaaggacgggagtatgacaaggacgggaacctccggccatggtggaagaactcatccgtggaggccttcaagcgtcagaccgagtgcatggtagagcagtacagcaactacagcgtgaacggggagccggtgaacgggcggcacaccctgggggagaacatcgccgacaacgggggtctcaaggcggcctatcgggcttaccagaactgggtgaagaagaacggggctgagcactcgctccccaccctgggcctcaccaataaccagctcttcttcctgggctttgcacaggtctggtgctccgtccgcacacctgagagctcccacgaaggcctcatcaccgatccccacagcccctctcgcttccgggtcatcggctccctctccaattccaaggagttctcagaacacttccgctgcccacctggctcacccatgaacccgcctcacaagtgcgaagtctggtaaggacgaagcggagagagccaagacggaggaggggaaggggctgaggacgagacccccatccagcctccagggcattgctcagcccgcttggccacc

SEQ ID NO: 43 - protein, 770 aa, Homo sapiens
MRGVWPPPVSALLSALGMSTYKRATLDEEDLVDSLSEGDAYPNGLQVNFHSPRSGQRCWAARTQVEKRLVVLVVLLAAGLVACLAALGIQYQTRSPSVCLSEACVSVTSSILSSMDPTVDPCHDFFSYACGGWIKANPVPDGHSRWGTFSNLWEHNQAIIKHLLENSTASVSEAERKAQVYYRACMNETRIEELRAKPLMELIERLGGWNITGPWAKDNFQDTLQVVTAHYRTSPFFSVYVSADSKNSNSNVIQVDQSGLGLPSRDYYLNKTENEKVLTGYLNYMVQLGKLLGGGDEEAIRPQMQQILDFETALANITIPQEKRRDEELIYHKVTAAELQTLAPAINWLPFLNTIFYPVEINESEPIVVYDKEYLEQISTLINTTDRCLLNNYMIWNLVRKTSSFLDQRFQDADEKFMEVMYGTKKTCLPRWKFCVSDTENNLGFALGPMFVKATFAEDSKSIATEIILEIKKAFEESLSTLKWMDEETRKSAKEKADAIYNMIGYPNFIMDPKELDKVFNDYTAVPDLYFENAMRFFNFSWRVTADQLRKAPNRDQWSMTPPMVNAYYSPTKNEIVFPAGILQAPFYTRSSPKALNFGGIGVVVGHELTHAFDDQGREYDKDGNLRPWWKNSSVEAFKRQTECMVEQYSNYSVNGEPVNGRHTLGENIADNGGLKAAYRAYQNWVKKNGAEHSLPTLGLTNNQLFFLGFAQVWCSVRTPESSHEGLITDPHSPSRFRVIGSLSNSKEFSEHFRCPPGSPMNPPHKCEVW

SEQ ID NO: 44 - DNA, 4039 bp, Homo sapiens
tgccaaggctccagcccggccgggctccgaggcgagaggctgcatggagtggccggcgcggctctgcgggctgtgggcgctgctgctctgcgccggcggcgggggcgggggcgggggcgccgcgcctacggaaactcagccacctgtgacaaatttgagtgtctctgttgaaaacctctgcacagtaatatggacatggaatccacccgagggagccagctcaaattgtagtctatggtattttagtcattttggcgacaaacaagataagaaaatagctccggaaactcgtcgttcaatagaagtacccctgaatgagaggatttgtctgcaagtggggtcccagtgtagcaccaatgagagtgagaagcctagcattttggttgaaaaatgcatctcacccccagaaggtgatcctgagtctgctgtgactgagcttcaatgcatttggcacaacctgagctacatgaagtgttcttggctccctggaaggaataccagtcccgacactaactatactctctactattggcacagaagcctggaaaaaattcatcaatgtgaaaacatctttagagaaggccaatactttggttgttcctttgatctgaccaaagtgaaggattccagttttgaacaacacagtgtccaaataatggtcaaggataatgcaggaaaaattaaaccatccttcaatatagtgcctttaacttcccgtgtgaaacctgatcctccacatattaaaaacctctccttccacaatgatgacctatatgtgcaatgggagaatccacagaattttattagcagatgcctattttatgaagtagaagtcaataacagccaaactgagacacataatgttttctacgtccaagaggctaaatgtgagaatccagaatttgagagaaatgtggagaatacatcttgtttcatggtccctggtgttcttcctgatactttgaacacagtcagaataagagtcaaaacaaataagttatgctatgaggatgacaaactctggagtaattggagccaagaaatgagtataggtaagaagcgcaattccacactctacataaccatgttactcattgttccagtcatcgtcgcaggtgcaatcatagtactcctgctttacctaaaaaggctcaagattattatattccctccaattcctgatcctggcaagatttttaaagaaatgtttggagaccagaatgatgatactctgcactggaagaagtacgacatctatgagaagcaaaccaaggaggaaaccgactctgtagtgctgatagaaaacctgaagaaagcctctcagtgatggagataatttatttttaccttcactgtgaccttgagaagattcttcccattctccatttgttatctgggaacttattaaatggaaactgaaactactgcaccatttaaaaacaggcagctcataagagccacaggtctttatgttgagtcgcgcaccgaaaaactaaaaataatgggcgctttggagaagagtgtggagtcattctcattgaattataaaagccagcaggcttcaaactaggggacaaagcaaaaagtgatgatagtggtggagttaatcttatcaagagttgtgacaacttcctgagggatctatacttgctttgtgttctttgtgtcaacatgaacaaattttatttgtaggggaactcatttggggtgcaaatgctaatgtcaaacttgagtcacaaagaacatgtagaaaacaaaatggataaaatctgatatgtattgtttgggatcctattgaaccatgtttgtggctattaaaactcttttaacagtctgggctgggtccggtggctcacgcctgtaatcccagcaatttgggagtccgaggcgggcggatcactcgaggtcaggagttccagaccagcctgaccaaaatggtgaaacctcctctctactaaaactacaaaaattaactgggtgtggtggcgcgtgcctgtaatcccagctactcgggaagctgaggcaggtgaattgtttgaacctgggaggtggaggttgcagtgagcagagatcacaccactgcactctagcctgggtgacagagcaagactctgtctaaaaaacaaaacaaaacaaaacaaaacaaaaaaacctcttaatattctggagtcatcattcccttcgacagcattttcctctgctttgaaagccccagaaatcagtgttggccatgatgacaactacagaaaaaccagaggcagcttctttgccaagacctttcaaagccattttaggctgttaggggcagtggaggtagaatgactccttgggtattagagtttcaaccatgaagtctctaacaatgtattttcttcacctctgctactcaagtagcatttactgtgtctttggtttgtgctaggcccccgggtgtgaagcacagaccccttccaggggtttacagtctatttgagactcctcagttcttgccacttttttttttaatctccaccagtcatttttcagaccttttaactcctcaattccaacactgatttccccttttgcattctccctccttcccttccttgtagccttttgactttcattggaaattaggatgtaaatctgctcaggagacctggaggagcagaggataattagcatctcaggttaagtgtgagtaatctgagaaacaatgactaattcttgcatattttgtaacttccatgtgagggttttcagcattgatatttgtgcattttctaaacagagatgaggtggtatcttcacgtagaacattggtattcgcttgagaaaaaaagaatagttgaacctatttctctttctttacaagatgggtccaggattcctcttttctctgccataaatgattaattaaatagcttttgtgtcttacattggtagccagccagccaaggctctgtttatgcttttggggggcatatattgggttccattctcacctatccacacaacatatccgtatatatcccctctactcttacttcccccaaatttaaagaagtatgggaaatgagaggcatttcccccaccccatttctctcctcacacacagactcatattactggtaggaacttgagaactttatttccaagttgttcaaacatttaccaatcatattaatacaatgatgctatttgcaattcctgctcctaggggaggggagataagaaaccctcactctctacaggtttgggtacaagtggcaacctgcttccatggccgtgtagaagcatggtgccctggcttctctgaggaagctggggttcatgacaatggcagatgtaaagttattcttgaagtcagattgaggctgggagacagccgtagtagatgttctactttgttctgctgttctctagaaagaatatttggttttcctgtataggaatgagattaattcctttccaggtattttataattctgggaagcaaaacccatgcctccccctagccatttttactgttatcctatttagatggccatgaagaggatgctgtgaaattcccaacaaacattgatgctgacagtcatgcagtctgggagtggggaagtgatcttttgttcccatcctcttcttttagcagtaaaatagctgagggaaaagggagggaaaaggaagttatgggaatacctgtggtggttgtgatccctaggtcttgggagctcttggaggtgtctgtatcagtggatttcccatcccctgtgggaaattagtaggctcatttactgttttaggtctagcctatgtggattttttcctaacatacctaagcaaacccagtgtcaggatggtaattcttattctttcgttcagttaagtttttcccttcatctgggcactgaagggatatgtgaaacaatgttaacatttttggtagtcttcaaccagggattgtttctgtttaacttcttataggaaagcttgagtaaaataaatattgtctttttgtatgtcaagcgggccgccaccgcggtggaaactccagctt

SEQ ID NO: 45 - protein, 427 aa, Homo sapiens
MEWPARLCGLWALLLCAGGGGGGGGAAPTETQPPVTNLSVSVENLCTVIWTWNPPEGASSNCSLWYFSHFGDKQDKKIAPETRRSIEVPLNERICLQVGSQCSTNESEKPSILVEKCISPPEGDPESAVTELQCIWHNLSYMKCSWLPGRNTSPDTNYTLYYWHRSLEKIHQCENIFREGQYFGCSFDLTKVKDSSFEQHSVQIMVKDNAGKIKPSFNIVPLTSRVKPDPPHIKNLSFHNDDLYVQWENPQNFISRCLFYEVEVNNSQTETHNVFYVQEAKCENPEFERNVENTSCFMVPGVLPDTLNTVRIRVKTNKLCYEDDKLWSNWSQEMSIGKKRNSTLYITMLLIVPVIVAGAIIVLLLYLKRLKIIIFPPIPDPGKIFKEMFGDQNDDTLHWKKYDIYEKQTKEETDSVVLIENLKKASQ

SEQ ID NO: 46 - DNA, 5496 bp, Homo sapiens
attcagccggtgcgcgcggcggcgggaggcagtggctggggagtcccgtcgacgctctgttccgagagcgtgccccggaccgccagctcagaacaggggcagccgtgtagccgaacggaagctgggagcagccgggactggtggcccgcgcccgagctccgcaggcgggaagcaccctggatttgggaagtcccgggagcagcgcggcggcacctccctcacccaaggggccgcggcgacggtcacggggcgcggcgccaccgtgagcgacccaggccaggattctaaatagacggcccaggctcctcctccgcccgggccgcctcacctgcgggcattgccgcgccgcctccgccggtgtagacggcacctgcgccgccttgctcgcgggtctccgcccctcgcccaccctcactgcgccaggcccaggcagctcacctgtactggcgcgggctgcggaagcctgcgtgagccgaggcgttgaggcgcggcgcccacgccactgtcccgagaggacgcaggtggagcgggcgcggcttcgcggaacccggcgccggccgccgcagtggtcccagcctacaccgggttccggggacccggccgccagtgcccggggagtagccgccgccgtcggctgggcaccatgaacagcagcagcgccaacatcacctacgccagtcgcaagcggcggaagccggtgcagaaaacagtaaagccaatcccagctgaaggaatcaagtcaaatccttccaagcggcatagagaccgacttaatacagagttggaccgtttggctagcctgctgcctttcccacaagatgttattaataagttggacaaactttcagttcttaggctcagcgtcagttacctgagagccaagagcttctttgatgttgcattaaaatcctcccctactgaaagaaacggaggccaggataactgtagagcagcaaatttcagagaaggcctgaacttacaagaaggagaattcttattacaggctctgaatggctttgtattagttgtcactacagatgctttggtcttttatgcttcttctactatacaagattatctagggtttcagcagtctgatgtcatacatcagagtgtatatgaacttatccataccgaagaccgagctgaatttcagcgtcagctacactgggcattaaatccttctcagtgtacagagtctggacaaggaattgaagaagccactggtctcccccagacagtagtctgttataacccagaccagattcctccagaaaactctcctttaatggagaggtgcttcatatgtcgtctaaggtgtctgctggataattcatctggttttctggcaatgaatttccaagggaagttaaagtatcttcatggacagaaaaagaaagggaaagatggatcaatacttccacctcagttggctttgtttgcgatagctactccacttcagccaccatccatacttgaaatccggaccaaaaattttatctttagaaccaaacacaaactagacttcacacctattggttgtgatgccaaaggaagaattgttttaggatatactgaagcagagctgtgcacgagaggctcaggttatcagtttattcatgcagctgatatgctttattgtgccgagtcccatatccgaatgattaagactggagaaagtggcatgatagttttccggcttcttacaaaaaacaaccgatggacttgggtccagtctaatgcacgcctgctttataaaaatggaagaccagattatatcattgtaactcagagaccactaacagatgaggaaggaacagagcatttacgaaaacgaaatacgaagttgccttttatgtttaccactggagaagctgtgttgtatgaggcaaccaacccttttcctgccataatggatcccttaccactaaggactaaaaatggcactagtggaaaagactctgctaccacatccactctaagcaaggactctctcaatcctagttccctcctggctgccatgatgcaacaagatgagtctatttatctctatcctgcttcaagtacttcaagtactgcaccttttgaaaacaactttttcaacgaatctatgaatgaatgcagaaattggcaagataatactgcaccgatgggaaatgatactatcctgaaacatgagcaaattgaccagcctcaggatgtgaactcatttgctggaggtcacccagggctctttcaagatagtaaaaacagtgacttgtacagcataatgaaaaacctaggcattgattttgaagacatcagacacatgcagaatgaaaaatttttcagaaatgatttttctggtgaggttgacttcagagacattgacttaacggatgaaatcctgacgtatgtccaagattctttaagtaagtctcccttcataccttcagattatcaacagcaacagtccttggctctgaactcaagctgtatggtacaggaacacctacatctagaacagcaacagcaacatcaccaaaagcaagtagtagtggagccacagcaacagctgtgtcagaagatgaagcacatgcaagttaatggcatgtttgaaaattggaactctaaccaattcgtgcctttcaattgtccacagcaagacccacaacaatataatgtctttacagacttacatgggatcagtcaagagttcccctacaaatctgaaatggattctatgccttatacacagaactttatttcctgtaatcagcctgtattaccacaacattccaaatgtacagagctggactaccctatggggagttttgaaccatccccataccccactacttctagtttagaagattttgtcacttgtttacaacttcctgaaaaccaaaagcatggattaaatccacagtcagccataataactcctcagacatgttatgctggggccgtgtcgatgtatcagtgccagccagaacctcagcacacccacgtgggtcagatgcagtacaatccagtactgccaggccaacaggcatttttaaacaagtttcagaatggagttttaaatgaaacatatccagctgaattaaataacataaataacactcagactaccacacatcttcagccacttcatcatccgtcagaagccagaccttttcctgatttgacatccagtggattcctgtaattccaagcccaattttgaccctggtttttggattaaattagtttgtgaaggattatggaaaaataaaactgtcactgttggacgtcagcaagttcacatggaggcattgatgcatgctattcacaattattccaaaccaaattttaatttttgcttttagaaaagggagtttaaaaatggtatcaaaattacatatactacagtcaagatagaaagggtgctgccacggagtggtgaggtaccgtctacatttcacattattctgggcaccacaaaatatacaaaactttatcagggaaactaagattcttttaaattagaaaatattctctatttgaattatttctgtcacagtaaaaataaaatactttgagttttgagctactggattcttattagttccccaaatacaaagttagagaactaaactagtttttcctatcatgttaacctctgcttttatctcagatgttaaaataaatggtttggtgctttttataaaaagataatctcagtgctttcctccttcactgtttcatctaagtgcctcacatttttttctacctataacactctaggatgtatattttatataaagtattctttttcttttttaaattaatatctttctgcacacaaatattatttgtgtttcctaaatccaaccaattttcattaattcaggcatattttaactccactgcttacctactttcttcaggtaaaagggcaaataatgatcgaaaaaataattatttattacataatttagttgtttctagactataaatgttgctatgtgccttatgttgaaaaaatttaaaagtaaaatgtctttccaaattatttcttaattattataaaaatattaagacaatagcacttaaattcctcaacagtgttttcagaagaaataaatataccactctttacctttattgatatctccatgatgatagttgaatgttgcaatgtgaaaaatctgctgttaactgcaaccttgtttattaaattgcaagaagctttatttctagctttttaattaagcaaagcacccatttcaatgtgtataaattgtctttaaaaactgttttagacctataatccttgataatatattgtgttgactttataaatttcgcttcttagaacagtggaaactatgtgtttttctcatatttgaggagtgttaagattgcagatagcaaggtttggtgcaaagtattgtaatgagtgaattgaatggtgcattgtatagatataatgaacaaaattatttgtaagatatttgcagtttttcattttaaaaagtccataccttatatatgcacttaatttgttggggctttacatactttatcaatgtgtctttctaagaaatcaagtaatgaatccaactgcttaaagttggtattaataaaaagacaaccacatagttcgtttaccttcaaactttaggtttttttaatgatatactgatcttcattaccaataggcaaattaatcaccctaccaactttactgtcctaacatggactttcaaaaagaaaaaatgacaccatcttttattctttttttttttttttttttgagagagagtcttactctgccgcccaaactggagtgcagtggcacaatcttggctcactgcaacctctacctcctgggttcaagtgattctcttgcctcagcctcccgagttgctgggattgcgggcatggtggcgtgagcctgtagtcctagctactcgggaggctgaggcaggagaatagcctgaacctgggaatcggaggttgcagggccaagatcgccccactgcactccagcctggcaatagaccgagctccgtctccaaaaaaaaaaatacaatttttatttcttttactttttttagtaagttaatgtatataaaaatggcttcggacaaaatatctctgagttctgtgtattttcagtcaaaactttaaacctgtagaatcaatttaagtgttgaaaaaaatttgtctgaaacatttcataatttgtttccagcatgaggtatctaaggatttagaccagaggtctagattaatactctatttttacatttaaaccttttattataagtcttacataaaccatttttgttactctcttccacatgttactggataaattgtttagtggaaaataggctttttaatcatgaatatgatgacaatcagttatacagttataaaattaaaagtttgaaaagcaatattgtatatttttatctatataaaataactaaaatgtatctaagaataataaaatcacgttaaacc

SEQ ID NO: 47 - protein, 848 aa, Homo sapiens
MNSSSANITYASRKRRKPVQKTVKPIPAEGIKSNPSKRHRDRLNTELDRLASLLPFPQDVINKLDKLSVLRLSVSYLRAKSFFDVALKSSPTERNGGQDNCRAANFREGLNLQEGEFLLQALNGFVLVVTTDALVFYASSTIQDYLGFQQSDVIHQSVYELIHTEDRAEFQRQLHWALNPSQCTESGQGIEEATGLPQTVVCYNPDQIPPENSPLMERCFICRLRCLLDNSSGFLAMNFQGKLKYLHGQKKKGKDGSILPPQLALFAIATPLQPPSILEIRTKNFIFRTKHKLDFTPIGCDAKGRIVLGYTEAELCTRGSGYQFIHAADMLYCAESHIRMIKTGESGMIVFRLLTKNNRWTWVQSNARLLYKNGRPDYIIVTQRPLTDEEGTEHLRKRNTKLPFMFTTGEAVLYEATNPFPAIMDPLPLRTKNGTSGKDSATTSTLSKDSLNPSSLLAAMMQQDESIYLYPASSTSSTAPFENNFFNESMNECRNWQDNTAPMGNDTILKHEQIDQPQDVNSFAGGHPGLFQDSKNSDLYSIMKNLGIDFEDIRHMQNEKFFRNDFSGEVDFRDIDLTDEILTYVQDSLSKSPFIPSDYQQQQSLALNSSCMVQEHLHLEQQQQHHQKQVVVEPQQQLCQKMKHMQVNGMFENWNSNQFVPFNCPQQDPQQYNVFTDLHGISQEFPYKSEMDSMPYTQNFISCNQPVLPQHSKCTELDYPMGSFEPSPYPTTSSLEDFVTCLQLPENQKHGLNPQSAIITPQTCYAGAVSMYQCQPEPQHTHVGQMQYNPVLPGQQAFLNKFQNGVLNETYPAELNNINNTQTTTHLQPLHHPSEARPFPDLTSSGFL

SEQ ID NO: 48 - DNA, 3537 bp, Mus musculus
ggcccctcgagcctcgaaccggaacctccaaatccgagacgctctgcttatgaggacctcgaaatatgccggccagtgaaaaaatcttgtggctttgagggcttttggttggccaggggcagtaaaaatctcggagagctgacaccaagtcctcccctgccacgtagcagtggtaaagtccgaagctcaaattccgagaattgagctctgttgattcttagaactggggttcttagaagtggtgatgcaagaagtttctaggaaaggccggacaccaggttttgagcaaaattttggactgtgaagcaaggcattggtgaagacaaaatggcctcgccggctgacagctgtatccagttcacccgccatgccagtgatgttcttctcaaccttaatcgtctccggagtcgagacatcttgactgatgttgtcattgttgtgagccgtgagcagtttagagcccataaaacggtcctcatggcctgcagtggcctgttctatagcatctttacagaccagttgaaatgcaaccttagtgtgatcaatctagatcctgagatcaaccctgagggattctgcatcctcctggacttcatgtacacatctcggctcaatttgcgggagggcaacatcatggctgtgatggccacggctatgtacctgcagatggagcatgttgtggacacttgccggaagtttattaaggccagtgaagcagagatggtttctgccatcaagcctcctcgtgaagagttcctcaacagccggatgctgatgccccaagacatcatggcctatcggggtcgtgaggtggtggagaacaacctgccactgaggagcgcccctgggtgtgagagcagagcctttgcccccagcctgtacagtggcctgtccacaccgccagcctcttattccatgtacagccacctccctgtcagcagcctcctcttctccgatgaggagtttcgggatgtccggatgcctgtggccaaccccttccccaaggagcgggcactcccatgtgatagtgccaggccagtccctggtgagtacagccggccgactttggaggtgtcccccaatgtgtgccacagcaatatctattcacccaaggaaacaatcccagaagaggcacgaagtgatatgcactacagtgtggctgagggcctcaaacctgctgccccctcagcccgaaatgccccctacttcccttgtgacaaggccagcaaagaagaagagagaccctcctcggaagatgagattgccctgcatttcgagccccccaatgcacccctgaaccggaagggtctggttagtccacagagcccccagaaatctgactgccagcccaactcgcccacagagtcctgcagcagtaagaatgcctgcatcctccaggcttctggctcccctccagccaagagccccactgaccccaaagcctgcaactggaagaaatacaagttcatcgtgctcaacagcctcaaccagaatgccaaaccagaggggcctgagcaggctgagctgggccgcctttccccacgagcctacacggccccacctgcctgccagccacccatggagcctgagaaccttgacctccagtccccaaccaagctgagtgccagcggggaggactccaccatcccacaagccagccggctcaataacatcgttaacaggtccatgacgggctctccccgcagcagcagcgagagccactcaccactctacatgcaccccccgaagtgcacgtcctgcggctctcagtccccacagcatgcagagatgtgcctccacaccgctggccccacgttccctgaggagatgggagagacccagtctgagtactcagattctagctgtgagaacggggccttcttctgcaatgagtgtgactgccgcttctctgaggaggcctcactcaagaggcacacgctgcagacccacagtgacaaaccctacaagtgtgaccgctgccaggcctccttccgctacaagggcaacctcgccagccacaagaccgtccataccggtgagaaaccctatcgttgcaacatctgtggggcccagttcaaccggccagccaacctgaaaacccacactcgaattcactctggagagaagccctacaaatgcgaaacctgcggagccagatttgtacaggtggcccacctccgtgcccatgtgcttatccacactggtgagaagccctatccctgtgaaatctgtggcacccgtttccggcaccttcagactctgaagagccacctgcgaatccacacaggagagaaaccttaccattgtgagaagtgtaacctgcatttccgtcacaaaagccagctgcgacttcacttgcgccagaagcatggcgccatcaccaacaccaaggtgcaataccgcgtgtcagccactgacctgcctccggagctccccaaagcctgctgaagcatggagtgttgatgctttcgtctccagccccttctcagaatctacccaaaggatactgtaacactttacaatgttcatcccatgatgtagtgcctctttcatccactagtgcaaatcatagctgggggttgggggtggtgggggtcggggcctgggggactgggagccgcagcagctccccctcccccactgccataaaacattaagaaaatcatattgcttcttctcctatgtgtaaggtgaaccatgtcagcaaaaagcaaaatcattttatatgtcaaagcaggggagtatgcaaaagttctgacttgactttagtctgcaaaatgaggaatgtatatgttttgtgggaacagatgtttcttttgtatgtaaatgtgcattcttttaaaagacaagacttcagtatgttgtcaaagagagggctttaatttttttaaccaaaggtgaaggaatatatggcagagttgtaaatatataaatatatatatatataaaataaatatatataaacctaacaaagatatattaaaaatataaaactgcgttaaaggctcgattttgtatctgcaggcagacacggatctgagaatctttattgagaaagagcacttaagagaatattttaagtattgcatctgtataagtaagaaaatattttgtctaaaatgcctcagtgtatttgtatttttttgcaagtgaaggtttacaatttacaaagtgtgtattaaaaaaaacaaaaagaacaaaaaaatctgcagaaggaaaaatgtgtaattttgttctagttttcagtttgtatatacccgtacaacgtgtcctcacggtgccttttttcacggaagttttcaatgatgggcgagcgtgcaccatccctttttgaagtgtaggcagacacagggacttgaagttgttactaactaaactctctttgggaatgtttgtctcatcccattctgcgtcatgcttgtgttataactactccggagacagggtttggctgtgtctaaactgcattaccgcgttgtaaaatatagctgtacaaatataagaataaaatgttgaaaagtcaaactggaaaaaaaa

SEQ ID NO: 49 - protein, 706 aa, Mus musculus [sequence omitted]

SEQ ID NO: 50 - DNA, 6480 bp, Homo sapiens
agagcgagcaggggagagcgagaccagttttaaggggaggaccggtgcgagtgaggcagccccgaggctctgctcgcccaccacccaatcctcgcctcccttctgctccaccttctctctctgccctcacctctcccccgaaaaccccctatttagccaaaggaaggaggtcaggggaacgctctcccctccccttccaaaaaacaaaaacagaaaaacccttttccaggccggggaaagcaggagggagaggggccgccgggctggccatggagctgctgtgccacgaggtggacccggtccgcagggccgtgcgggaccgcaacctgctccgagacgaccgcgtcctgcagaacctgctcaccatcgaggagcgctaccttccgcagtgctcctacttcaagtgcgtgcagaaggacatccaaccctacatgcgcagaatggtggccacctggatgctggaggtctgtgaggaacagaagtgcgaagaagaggtcttccctctggccatgaattacctggaccgtttcttggctggggtcccgactccgaagtcccatctgcaactcctgggtgctgtctgcatgttcctggcctccaaactcaaagagaccagcccgctgaccgcggagaagctgtgcatttacaccgacaactccatcaagcctcaggagctgctggagtgggaactggtggtgctggggaagttgaagtggaacctggcagctgtcactcctcatgacttcattgagcacatcttgcgcaagctgccccagcagcgggagaagctgtctctgatccgcaagcatgctcagaccttcattgctctgtgtgccaccgactttaagtttgccatgtacccaccgtcgatgatcgcaactggaagtgtgggagcagccatctgtgggctccagcaggatgaggaagtgagctcgctcacttgtgatgccctgactgagctgctggctaagatcaccaacacagacgtggattgtctcaaagcttgccaggagcagattgaggcggtgctcctcaatagcctgcagcagtaccgtcaggaccaacgtgacggatccaagtcggaggatgaactggaccaagccagcacccctacagacgtgcgggatatcgacctgtgaggatgccagttgggccgaaagagagagacgcgtccataatctggtctcttcttctttctggttgtttttgttctttgtgttttagggtgaaacttaaaaaaaaaattctgcccccacctagatcatatttaaagatcttttagaagtgagagaaaaaggtcctacgaaaacggaataataaaaagcatttggtgcctatttgaagtacagcataagggaatcccttgtatatgcgaacagttattgtttgattatgtaaaagtaatagtaaaatgcttacaggaaaacctgcagagtagttagagaatatgtatgcctgcaatatgggaacaaattagaggagacttttttttttcatgttatgagctagcacatacacccccttgtagtataatttcaaggaactgtgtacgccatttatggcatgattagattgcaaagcaatgaactcaagaaggaattgaaataaggagggacatgatggggaaggagtacaaaacaatctctcaacatgattgaaccatttgggatggagaagcacctttgctctcagccacctgttactaagtcaggagtgtagttggatctctacattaatgtcctcttgctgtctacagtagctgctacctaaaaaaagatgttttattttgccagttggacacaggtgattggctcctgggtttcatgttctgtgacatcctgcttcttcttccaaatgcagttcattgcagacaccaccatattgctatctaatggggaaatgtagctatgggccataaccaaaactcacatgaaacggaggcagatggagaccaagggtgggatccagaatggagtcttttctgttattgtatttaaaagggtaatgtggccttggcatttcttcttagaaaaaaactaatttttggtgctgattggcatgtctggttcacagtttagcattgttataaaccattccattcgaaaagcactttgaaaaattgttcccgagcgatagatgggatggtttatgcaagtcatgctgaatactcctcccctcttctcttttgccccctcccttcctgcccccagtctgggttactcttcgcttctggtatctggcgttctttggtacacagttctggtgttcctaccaggactcaagagacaccccttcctgctgacattcccatcacaacattcctcagacaagcctgtaaactaaaatctgttaccattctgatggcacagaaggatcttaattcccatctctatacttctcctttggacatggaaagaaaagttattgctggtgcaaagatagatggctgaacatcagggtgtggcattttgttcccttttccgttttttttttttttattgttgttgttaattttattgcaaagttgtattcagcgtacttgaatttttcttcctctccacttcttagaggcattcagttagcaaagaggttggagcaacaacttttttttttttttttgcacaattgtaattgacaggtaatgaagctatttgttaaaatatttgcctttttaagtaaaaaagaaaaatcagaacagggctatttgaagaattattttatacacagattctgccttgtttcatagtatgagggttgaagacggaaaacaatctaagggtctctcatttttttaattttgttttgttcagtttggtttttttttttttttgcgctgctaagaagctaaagtcatccatccttattcacgttgacagtacctagctgtaatgtttcacagagtgtgctgctattttataaacatttttataatatattattttactgcttaaattccaagtcctgaagtagatggttgagatatgagttcttcgtactggaaaagcccttccgtagtttgttttcttctggtagcatattcatggttgtttttttttttcttttttggttttttggttttttttttttcctctgatcacattcttcaaagacggagtattctttacctcaggtttactggacaaaatcaataactacaaaaggcaatgattcacgcttttgttttcataatacctcacaaccgtacagtttctgcttgggagcccattcgcatgaggaatacagaagcagtgtgagcagggctgactccctctcaggtggaaggcagggcggtctcactcccagggacctttttggtcatggaggccatcgggctcccagttagaccctggtatcctcatcatgatggaaaaaatacattgaaccaagggatcctccctccccttcaaggcagacgttcagtacaaacatttatgcggtaggctcagatgtcgtaatttgcacttaggtaccaggtgtcaggaaacagactaaaaagaattccaccaggctgtttggagatcctcatcttggagctttttcaaaagcggggcttcatctgcaaagggccctttcatcttgaagtttttcccctccgtctttcccctcccctggcatggacaccttgtgtttaggatcatctctgcaggtttcctaggtctgaatctgcgagtagatgaacctgcagcaagcagcgtttatggtgcttccttctccctcctctgtctcaaactgcgcaggcaagcactatgcaagcccaggccctctgctgagcggtactaaacggtcgggttttcaatcacactgaattggcaggataagaaaaataggtcagataagtatgggatgatagttgaagggaggtgaagaggctgcttctctacagaggtgaaattccagatgagtcagtctcttgggaagtgtgtttagaagggttcaggactttgtgagttagcatgaccctaaaattctaggggatttctggtgggacaatgggtggtgaattttgaagttttggagagggaagtggagcagccagcaagtaagctagccagagttttctcaagagccagctttgctcagcacactctcctgggccccaaggagtcccacggaatggggaaagtgggaaccctggagttcttgggaatcttggagcctaaagagaaaccgaggtgcaaattcatttcatggtgactgacccttgagcttaaacagaagcagcaaatgaaagaaccggacaaataaggaagggcacaagcctacccgactctatttacagtctgtaactttccactcttcctgtagtcccgaggcccctgggtccttctagcttttctctttcccatccttggggccttgtgtgatgatgggtgtggggctgccgatgggaaagtcgggggttgttaggcttttctgcctgctcctgcttaaacacaagaaggaatcctggattttgccctctccttagctcttagtctctttggtaggagttttgttccagaggagctctcccccttggatttgaacttgctctttttgttgttgttgttctttctcttctttttcttacctcccactaaaggggttccaaattatcctggtctttttctaccttgttgtgtttctatctcgtctttacttccatctgtttgtttttttctccatcagtgggggccgagttgttcccccagcctgccaaattttgatccttcccctcttttggccaaatcctagggggaagaaatcctagtatgccaaaaatatatgctaagcataattaaactccatgcgggtccataacagccaagaagcctgcaggagaaagccaagggcagttccctccgcagaacaccccatgcgtgctgagaggcgagctccttgaagaaggggctgttcttccaggaggccttattttgaactgcctcaggaccccactggagagcacagcatgccttactactgggtcatccttggtctatgtgctctgtactggaggctctgttctgcctcttatcagccaggtcaggggcacacatggcttaagtgacaaagccagaggagaagacaaccctgacagcatcacgctgcatcccattgctagcaggattggcaactcttcagacggagctgcgcttccctgcagtctagcacctctagggcctctccagactgtgccctgggagctctgggactgaaaggttaagaacataaggcaggatcagatgactctctccaagagggcaggggaattttctctccatgggccacaggggacagggctgggagaagaaatagacttgcaccttatgtcatgtaaataattgattttctagttcaagaagataatattggtagtgtgggaattggaggtaggaaggggaggaagtctgagtaagccagttggcttctaagccaaaaggattcctctttgtttatctctgagacagtccaaccttgagaatagctttaaaagggaaattaatgctgagatgataaagtccccttaagccaacaaaccctctgtagctatagaatgagtgcaggtttctattggtgtggactcagagcaatttacaagagctgttcatgcagccatccatttgtgcaaaatagggtaagaagattcaagaggatatttattacttcctcataccacatggcttttgatgattctggattctaaacaacccagaatggtcatttcaggcacaacgatactacattcgtgtgtgtctgcttttaaacttggctgggctatcagaccctattctcggctcaggttttgagaagccatcagcaaatgtgtacgtgcatgctgtagctgcagcctgcatcccttcgcctgcagcctactttggggaaataaagtgccttactgactgtagccattacagtatccaatgtcttttgacaggtgcctgtccttgaaaaacaaagtttctatttttatttttaattggtttagttcttaactgctggccaactcttacatccccagcaaatcatcgggccattggattttttccattatgttcatcacccttatatcatgtacctcagatctctctctctctcctctctctcagttatatagtttcttgtcttggactttttttttcttttctttttctttttttttttgctttaaaacaagtgtgatgccatatcaagtccatgttattctctcacagtgtactctataagaggtgtgggtgtctgtttggtcaggatgttagaaagtgctgataagtagcatgatcagtgtatgcgaaaaggtttttaggaagtatggcaaaaatgttgtattggctatgatggtgacatgatatagtcagctgccttttaagaggtcttatctgttcagtgttaagtgatttaaaaaaataataacctgttttctgactagtttaaagatggatttgaaaatggttttgaatgcaattaggttatgctatttggacaataaactcaccttgacct

SEQ ID NO: 51 - protein, 289 aa, Homo sapiens
MELLCHEVDPVRRAVRDRNLLRDDRVLQNLLTIEERYLPQCSYFKCVQKDIQPYMRRMVATWMLEVCEEQKCEEEVFPLAMNYLDRFLAGVPTPKSHLQLLGAVCMFLASKLKETSPLTAEKLCIYTDNSIKPQELLEWELVVLGKLKWNLAAVTPHDFIEHILRKLPQQREKLSLIRKHAQTFIALCATDFKFAMYPPSMIATGSVGAAICGLQQDEEVSSLTCDALTELLAKITNTDVDCLKACQEQIEAVLLNSLQQYRQDQRDGSKSEDELDQASTPTDVRDIDL

SEQ ID NO: 52 - DNA, 2562 bp, Homo sapiens
gccgcgccggctctgggcactcagcatcgtttccttttcctccgctggagcagctatggcggcggtgaagaccctgaaccccaaggccgaggtggcccgagcgcaggcggcgctggcggtcaacatcagcgcagcgcggggtctgcaggacgtgctaaggaccaacctggggcccaagggcaccatgaagatgctcgtttctggcgctggagacatcaaacttactaaagacggcaatgtgctgcttcacgaaatgcaaattcaacacccaacagcttccttaatagcaaaggtagcaacagcccaggatgatataactggtgatggtacgacttctaatgtcctaatcattggagagctgctgaaacaggcggatctctacatttctgaaggccttcatcctagaataatcactgaaggatttgaagctgcaaaggaaaaggcccttcagtttttggaagaagtcaaagtaagcagagagatggacagggaaacacttatagatgtggccagaacatctcttcgtactaaagttcatgctgaacttgcagatgtcttaacagaggctgtagtggactccattttggccattaaaaagcaagatgaacctattgatctcttcatgattgagatcatggagatgaaacataaatctgaaactgatacaagcttaatcagagggcttgttttggaccacggagcacggcatcctgatatgaagaaaagggtggaggatgcatacatcctcacttgtaacgtgtcattagagtatgagaaaacagaagtgaattctggctttttttacaagagtgcagaagagagagaaaaactcgtgaaagctgaaagaaaattcattgaagatagggttaaaaaaataatagaactgaaaaggaaagtctgtggcgattcagataaaggatttgttgttattaatcaaaagggaattgaccccttttccttagatgctctttcaaaagaaggcatagtcgctctgcgcagagctaaaaggagaaatatggagaggctgactcttgcttgtggtggggtagccctgaattcttttgacgacctaagtcctgactgcttgggacatgcaggacttgtatatgagtatacattgggagaagagaagtttacctttattgagaaatgtaacaaccctcgttctgtcacattattgatcaaaggaccaaataagcacacactcactcagatcaaagatgcagtgagggacggcttgagggctgtcaaaaatgctattgatgatggctgtgtggttccaggtgctggtgccgtggaagtggcaatggcagaagccctgattaaacataagcccagtgtaaagggcagggcacagcttggagtccaagcatttgctgatgcattgctcattattcccaaggttcttgctcagaactctggttttgaccttcaggaaacattagttaaaattcaagcagaacattcagaatcaggtcagcttgtgggtgtggacctgaacacaggtgagccaatggtggcagcagaagtaggcgtatgggataactattgtgtaaagaaacagcttcttcactcctgcactgtgattgccaccaacattctcttggttgatgagatcatgcgagctggaatgtcttctctgaaaggttgaattgaagcttcctctgtatctgaatcttgaagactgcaaagtgatcctgaggattacagctgtggaatttttgtccaagcttcaaataattttgaaagaaattttcccatatgaaaaaaggagagaacactggcatctgttgaaatttggaagttctgaaattatagtatttttaaaaattgcactgaagtgtatacacataaagcaggtcttttatccagtgaacaggatgttttgctttagcagcagtgacataaaattccatgttagataagcatatgttacttaccttgttattaaatatttcttgaaaagcaaattttaatggttaattttatgtggacgtatgttaaattatccaaactaccctattgttaagcatttggttttaaaatttttatgctaatataaatgctcaagtaatttaaaatattgaaagcatccctgttggtataaatttctgagtaaatgcattggatcagttggactttgaacgccctttgaaatggctttgctaaaatgctcccgccacaaagttgtaggaaatgggaagaggagtcaactagaggcaagggagttgagagagctgcaactgtaaagggcaagaacaggcagaggtaaaaagatgatggaaggtgtggtgactaagggccacggttattgggtgaaatttgagatgtaggccaactgtattttcaagcttctgaacttaaggcaaaatattcatcgcaaagtctctagcgtcatatttttctcacccaaattacgtttccacgagttattatatatagttggtctatctctgcagtccttgaaggtgaagttgtgtgttactaggctgtgttttgggatgtcagcagtggcctgaagtgagttgtgcaataaatgttaagttgaaacctcaaaaaaaa

SEQ ID NO: 53 - protein, 531 aa, Homo sapiens
MAAVKTLNPKAEVARAQAALAVNISAARGLQDVLRTNLGPKGTMKMLVSGAGDIKLTKDGNVLLHEMQIQHPTASLIAKVATAQDDITGDGTTSNVLIIGELLKQADLYISEGLHPRIITEGFEAAKEKALQFLEEVKVSREMDRETLIDVARTSLRTKVHAELADVLTEAVVDSILAIKKQDEPIDLFMIEIMEMKHKSETDTSLIRGLVLDHGARHPDMKKRVEDAYILTCNVSLEYEKTEVNSGFFYKSAEEREKLVKAERKFIEDRVKKIIELKRKVCGDSDKGFVVINQKGIDPFSLDALSKEGIVALRRAKRRNMERLTLACGGVALNSFDDLSPDCLGHAGLVYEYTLGEEKFTFIEKCNNPRSVTLLIKGPNKHTLTQIKDAVRDGLRAVKNAIDDGCVVPGAGAVEVAMAEALIKHKPSVKGRAQLGVQAFADALLIIPKVLAQNSGFDLQETLVKIQAEHSESGQLVGVDLNTGEPMVAAEVGVWDNYCVKKQLLHSCTVIATNILLVDEIMRAGMSSLKG

SEQ ID NO: 54 - DNA, 1246 bp, Homo sapiens
gaccagcctacagccgcctgcatctgtatccagcgccaggtcccgccagtcccagctgcgcgcgccccccagtcccgcacccgttcggcccaggctaagttagccctcaccatgccggtcaaaggaggcaccaagtgcatcaaatacctgctgttcggatttaacttcatcttctggcttgccgggattgctgtccttgccattggactatggctccgattcgactctcagaccaagagcatcttcgagcaagaaactaataataataattccagcttctacacaggagtctatattctgatcggagccggcgccctcatgatgctggtgggcttcctgggctgctgcggggctgtgcaggagtcccagtgcatgctgggactgttcttcggcttcctcttggtgatattcgccattgaaatagctgcggccatctggggatattcccacaaggatgaggtgattaaggaagtccaggagttttacaaggacacctacaacaagctgaaaaccaaggatgagccccagcgggaaacgctgaaagccatccactatgcgttgaactgctgtggtttggctgggggcgtggaacagtttatctcagacatctgccccaagaaggacgtactcgaaaccttcaccgtgaagtcctgtcctgatgccatcaaagaggtcttcgacaataaattccacatcatcggcgcagtgggcatcggcattgccgtggtcatgatatttggcatgatcttcagtatgatcttgtgctgtgctatccgcaggaaccgcgagatggtctagagtcagcttacatccctgagcaggaaagtttacccatgaagattggtgggattttttgtttgtttgttttgttttgtttgttgtttgttgtttgtttttttgccactaattttagtattcattctgcattgctagataaaagctgaagttactttatgtttgtcttttaatgcttcattcaatattgacatttgtagttgagcggggggtttggtttgctttggtttatattttttcagttgtttgtttttgcttgttatattaagcagaaatcctgcaatgaaaggtactatatttgctagactctagacaagatattgtacataaaagaatttttttgtctttaaatagatacaaatgtctatcaactttaatcaagttgtaacttatattgaagacaatttgatacataataaaaaattatgacaatgtcaaaaaaaaaaaaaaa

SEQ ID NO: 55 - protein, 228 aa, Homo sapiens
MPVKGGTKCIKYLLFGFNFIFWLAGIAVLAIGLWLRFDSQTKSIFEQETNNNNSSFYTGVYILIGAGALMMLVGFLGCCGAVQESQCMLGLFFGFLLVIFAIEIAAAIWGYSHKDEVIKEVQEFYKDTYNKLKTKDEPQRETLKAIHYALNCCGLAGGVEQFISDICPKKDVLETFTVKSCPDAIKEVFDNKFHIIGAVGIGIAVVMIFGMIFSMILCCAIRRNREMV

SEQ ID NO: 56 - DNA, 1702 bp, Homo sapiens
agactcaacaagagctccagcaaagactttcactgtagcttgacttgacctgagattaactagggaatcttgagaataaagatgagctctgaaaattgtttcgtagcagagaacagctctttgcatccggagagtggacaagaaaatgatgccaccagtccccatttctcaacacgtcatgaagggtccttccaagttcctgtcctgtgtgctgtaatgaatgtggtcttcatcaccattttaatcatagctctcattgccttatcagtgggccaatacaattgtccaggccaatacacattctcaatgccatcagacagccatgtttcttcatgctctgaggactgggttggctaccagaggaaatgctactttatttctactgtgaagaggagctggacttcagcccaaaatgcttgttctgaacatggtgctactcttgctgtcattgattctgaaaaggacatgaactttctaaaacgatacgcaggtagagaggaacactgggttggactgaaaaaggaacctggtcacccatggaagtggtcaaatggcaaagaatttaacaactggttcaacgttacagggtctgacaagtgtgtttttctgaaaaacacagaggtcagcagcatggaatgtgagaagaatttatactggatatgtaacaaaccttacaaataataaggaaacatgttcacttattgactattatagaatggaactcaaggaaatctgtgtcagtggatgctgctctgtggtccgaagtcttccatagagactttgtgaaaaaaaattttatagtgtcttgggaattttcttccaaacagaactatggaaaaaaaggaagaaattccaggaaaatctgcactgtgggcttttattgccatgagctagaagcatcacaggttgaccaataaccatgcccaagaatgagaagaatgactatgcaacctttggatgcactttatattattttgaatccagaaataatgaaataactaggcgtggacttactatttattgctgaatgactaccaacagtgagagcccttcatgcatttgcactactggaaggagttagatgttggtactagatactgaatgtaaacaaaggaattatggctggtaacataggtttttagtctaattgaatcccttaaactcagggagcatttataaatggacaaatgcttatgaaactaagatttgtaatatttctctctttttagagaaatttgccaatttactttgttatttttccccaaaaagaatgggatgatcgtgtatttatttttttacttcctcagctgtagacaggtccttttcgatggtacatatttctttgcctttataatcttttatacagtgtcttacagagaaaagacataagcaaagactatgaggaatatttgcaagacatagaatagtgttggaaaatgtgcaatatgtgatgtggcaaatctctattaggaaatattctgtaatcttcagacctagaataatactagtcttataataggtttgtgactttcctaaatcaattctattacgtgcaatacttcaatacttcatttaaaatatttttatgtgcaataaaatgtatttgtttgtattttgtgttcagtacaattataagctgtttttatatatgtgaaataaaagtagaataaacacaaaaaaaaaaaaaaaaaaaaaaaaaaaa

SEQ ID NO: 57 - protein, 199 aa, Homo sapiens
MSSENCFVAENSSLHPESGQENDATSPHFSTRHEGSFQVPVLCAVMNVVFITILIIALIALSVGQYNCPGQYTFSMPSDSHVSSCSEDWVGYQRKCYFISTVKRSWTSAQNACSEHGATLAVIDSEKDMNFLKRYAGREEHWVGLKKEPGHPWKWSNGKEFNNWFNVTGSDKCVFLKNTEVSSMECEKNLYWICNKPYK

SEQ ID NO: 58 - DNA, 430 bp, Homo sapiens
gacagccacgaagatcctaccaaaatgaagcgcttcctcttcctcctactcaccatcagcctcctggttatggtacagatacaaactggactctcaggacaaaacgacaccagccaaaccagcagcccctcagcatccagcagcatgagcggaggcattttccttttcttcgtggccaatgccataatccacctcttctgcttcagttgaggtgacacgtctcagccttagccctgtgccccctgaaacagctgccaccatcactcgcaagagaatcccctccatctttgggaggggttgatgccagacatcaccaggttgtagaagttgacaggcagtgccatgggggcaacagccaaaataggggggtaatgatgtaggggccaagcagtgcccagctgggggagaataaagttacccttgtactgca

SEQ ID NO: 59 - protein, 61 aa, Homo sapiens
MKRFLFLLLTISLLVMVQIQTGLSGQNDTSQTSSPSASSSMSGGIFLFFVANAIIHLFCFS

SEQ ID NO: 60 - DNA, 1804 bp, Homo sapiens
gcggtggtggacacgtcgagccgggtagaagtggaggggccgttcgaagagtcgtgagggggtgacgggttaagattcggagagagaggtgctagtggctggacttgacctggaaagaatcttctgctgactctcaacttttcctggaaaaaatggatcattcccaccatatggggatgagctatatggactccaacagtaccatgcaaccttctcaccatcacccaaccacttcagcctcacactcccatggtggaggagacagcagcatgatgatgatgcctatgaccttctactttggctttaagaatgtggaactactgttttccggtttggtgatcaatacagctggagaaatggctggagcttttgtggcagtgtttttactagcaatgttctatgaaggactcaagatagcccgagagagcctgctgcgtaagtcacaagtcagcattcgctacaattccatgcctgtcccaggaccaaatggaaccatccttatggagacacacaaaactgttgggcaacagatgctgagctttcctcacctcctgcaaacagtgctgcacatcatccaggtggtcataagctacttcctcatgctcatcttcatgacctacaacgggtacctctgcattgcagtagcagcaggggccggtacaggatacttcctcttcagctggaagaaggcagtggtagtggatatcacagagcattgccattgacatcaaactctatggcgtggccttatcgattgcagtgggaagttgttgaagacttgaagacgtgattcctgctccaatcatcccttcttgctcctctttgtgcacgtacacacacacacacacacacacacacacacacacacccctgctcaacagaggtttagtttacagtctctgaactaaagtagtaacctcccaaattgttttttctaataagctgagattcccatttctcttaaggagaagccacccatgagatgtcttttccttctccatcatcttagagccaagttatatgttcttgtctaatccatgtagctttttgttcaatgacttgatcatctgcttcctttttgaatttttaacagatagtaagtaaatttggtggttttttcccctgggtcagtgatggaaaggggttaacttcagccaggattgatggcagctgagggaaattcttgcccaactaaacccagaactcaaacttaacattagaaaataaggtccagggccggacacagtggcccatgcctgtaatcccagcactttggggggccaaggcaggctggatcacctgaggacaggagttcgagaccagtctggccaacatggggaaaccccgtctctactaaaaatacaaaaattagccgggcatggtggtgggcgcctgtaatcccagctactcagaaggctgaggcaggagaatcacttgaacctaggaggcggaggttgcagtgagccaagatggcgccattgcactccagcctgggtgacaagagtgaaactccatctcaaaaaaaaagaaaagaaggtccagcttttggattcaatgagtgggaaatacattgtgcctttctctagatgtgatacgttataccaaaatctttgtagtgtgcagagcggtggtttgagactaaatacaggcttagaacttgcagagtgtgtattcttggatggctgatgcatcgacttgcattcccacttaacactttgattagccatgaacttgccaatcaaaaaatgacaatcaatttgagaaaatagaaatagatatttttaaataaaaccattcacagttt

SEQ ID NO: 61 - protein, 190 aa, Homo sapiens
MDHSHHMGMSYMDSNSTMQPSHHHPTTSASHSHGGGDSSMMMMPMTFYFGFKNVELLFSGLVINTAGEMAGAFVAVFLLAMFYEGLKIARESLLRKSQVSIRYNSMPVPGPNGTILMETHKTVGQQMLSFPHLLQTVLHIIQVVISYFLMLIFMTYNGYLCIAVAAGAGTGYFLFSWKKAVVVDITEHCH

SEQ ID NO: 62 - DNA, 1431 bp, Homo sapiens
atgaccatggaaacagttgaatcccagcatgatggaagtataacagcttctttgacagagagcaagtctgctcatgtgcagactcagactgggcaaatttcaatccctgctttagctcagtgcagtgagctgagatcaggcaccagaagaggctccccagctgtaactctagtgcagttaccttcgggccaaactatacatgtccagggagtaattcagacaccacagccatgggttattcagtcatcagaaatacacaccgttcaggtagcagcaattgcagagacagatgaatctgcagaatcagaaggtgtaattgattctcataaacgtagagaaatcctttcacgaagaccctcttataggaaaatactgaatgaactgtcctctgatgtgcctggtgttcccaagattgaagaagagagatcagaggaagaaggaacaccacctagtattgctaccatggcagtaccaactagcatatatcagactagcacggggcaatacattgctatagcccaaggtggaacaatccagatttctaacccaggatctgatggtgttcagggactgcaggcattaacaatgacaaattcaggagctcctccaccaggtgctacaattgtacagtacgcagcacaatcagctgatggcacacagcagttctttgtcccaggcagccaggttgttgttcaagctgccactggtgacatgccaacttaccagatccgagctcctactgctgctttgccacagggagtggtgatggctgcatcgcccggaagtttgcacagtccccagcagctggcagaagaagcaacacgcaaacgagagctgaggctaatgaaaaacagagaagctgcccgggagtgtcgcaggaagaagaaagaatatgtcaaatgtcttgaaaatcgtgtggctgtgcttgaaaaccaaaacaagactctcattgaggaactcaaggccctcaaagatctttattgccataaagtagagtaactgtctttgacttggaccttgtttactctaatcaaggcaggagatgcagcagtcctacttattgccatgtggacttgtgggaaggacacgtgtgacccttaagaatccagtttggattagtgtttgaaattgaattgggaatgttgttccaggatgtggaatgcagcgtgatcacacttaccgagcttactttgatctgtttgtcaatagcatgcaaaaaatgctttgtttgccctttgcttctgctttttttcagggaagctgccaaagaatgtcgacgtcgaaagaaagaatatgtaaaatgcctggagagccgagttgcagtgctggaagtccagaacaagaagcttatagaggaacttgaaaccttgaaagacatttgttctcccaaaactgattactagaaatatttaactatgaactgattacaga

SEQ ID NO: 63 - protein, 332 aa, Homo sapiens
MTMETVESQHDGSITASLTESKSAHVQTQTGQISIPALAQCSELRSGTRRGSPAVTLVQLPSGQTIHVQGVIQTPQPWVIQSSEIHTVQVAAIAETDESAESEGVIDSHKRREILSRRPSYRKILNELSSDVPGVPKIEEERSEEEGTPPSIATMAVPTSIYQTSTGQYIAIAQGGTIQISNPGSDGVQGLQALTMTNSGAPPPGATIVQYAAQSADGTQQFFVPGSQVVVQAATGDMPTYQIRAPTAALPQGVVMAASPGSLHSPQQLAEEATRKRELRLMKNREAARECRRKKKEYVKCLENRVAVLENQNKTLIEELKALKDLYCHKVE

SEQ ID NO: 64 - DNA, 2312 bp, Homo sapiens
tccagtgacggagccgcccggccgacagccccgagacgacagcccggcgcgtcccggtccccacctccgaccaccgccagcgctccaggccccgcgctccccgctcgccgccaccgcgccctccgctccgcccgcagtgccaaccatgaccgccgccagtatgggccccgtccgcgtcgccttcgtggtcctcctcgccctctgcagccggccggccgtcggccagaactgcagcgggccgtgccggtgcccggacgagccggcgccgcgctgcccggcgggcgtgagcctcgtgctggacggctgcggctgctgccgcgtctgcgccaagcagctgggcgagctgtgcaccgagcgcgacccctgcgacccgcacaagggcctcttctgtgacttcggctccccggccaaccgcaagatcggcgtgtgcaccgccaaagatggtgctccctgcatcttcggtggtacggtgtaccgcagcggagagtccttccagagcagctgcaagtaccagtgcacgtgcctggacggggcggtgggctgcatgcccctgtgcagcatggacgttcgtctgcccagccctgactgccccttcccgaggagggtcaagctgcccgggaaatgctgcgaggagtgggtgtgtgacgagcccaaggaccaaaccgtggttgggcctgccctcgcggcttaccgactggaagacacgtttggcccagacccaactatgattagagccaactgcctggtccagaccacagagtggagcgcctgttccaagacctgtgggatgggcatctccacccgggttaccaatgacaacgcctcctgcaggctagagaagcagagccgcctgtgcatggtcaggccttgcgaagctgacctggaagagaacattaagaagggcaaaaagtgcatccgtactcccaaaatctccaagcctatcaagtttgagctttctggctgcaccagcatgaagacataccgagctaaattctgtggagtatgtaccgacggccgatgctgcaccccccacagaaccaccaccctgccggtggagttcaagtgccctgacggcgaggtcatgaagaagaacatgatgttcatcaagacctgtgcctgccattacaactgtcccggagacaatgacatctttgaatcgctgtactacaggaagatgtacggagacatggcatgaagccagagagtgagagacattaactcattagactggaacttgaactgattcacatctcatttttccgtaaaaatgatttcagtagcacaagttatttaaatctgtttttctaactgggggaaaagattcccacccaattcaaaacattgtgccatgtcaaacaaatagtctatcttccccagacactggtttgaagaatgttaagacttgacagtggaactacattagtacacagcaccagaatgtatattaaggtgtggctttaggagcagtgggagggtaccagcagaaaggttagtatcatcagatagctcttatacgagtaatatgcctgctatttgaagtgtaattgagaaggaaaattttagcgtgctcactgacctgcctgtagccccagtgacagctaggatgtgcattctccagccatcaagagactgagtcaagttgttccttaagtcagaacagcagactcagctctgacattctgattcgaatgacactgttcaggaatcggaatcctgtcgattagactggacagcttgtggcaagtgaatttcctgtaacaagccagattttttaaaatttatattgtaaatattgtgtgtgtgtgtgtgtgtgtatatatatatatatatgtacagttatctaagttaatttaaagttgtttgtgcctttttatttttgtttttaatgctttgatatttcaatgttagcctcaatttctgaacaccataggtagaatgtaaagcttgtctgatcgttcaaagcatgaaatggatacttatatggaaattctctcagatagaatgacagtccgtcaaaacagattgtttgcaaaggggaggcatcagtgtccttggcaggctgatttctaggtaggaaatgtggtagctcacgctcacttttaatgaacaaatggcctttattaaaaactgagtgactctatatagctgatcagttttttcacctggaagcatttgtttctactttgatatgactgtttttcggacagtttatttgttgagagtgtgaccaaaagttacatgtttgcacctttctagttgaaaataaagtatattttttctaaaaaaaaaaaaaaacgacagcaacggaattc

SEQ ID NO: 65 - protein, 349 aa, Homo sapiens
MTAASMGPVRVAFVVLLALCSRPAVGQNCSGPCRCPDEPAPRCPAGVSLVLDGCGCCRVCAKQLGELCTERDPCDPHKGLFCDFGSPANRKIGVCTAKDGAPCIFGGTVYRSGESFQSSCKYQCTCLDGAVGCMPLCSMDVRLPSPDCPFPRRVKLPGKCCEEWVCDEPKDQTVVGPALAAYRLEDTFGPDPTMIRANCLVQTTEWSACSKTCGMGISTRVTNDNASCRLEKQSRLCMVRPCEADLEENIKKGKKCIRTPKISKPIKFELSGCTSMKTYRAKFCGVCTDGRCCTPHRTTTLPVEFKCPDGEVMKKNMMFIKTCACHYNCPGDNDIFESLYYRKMYGDMA

SEQ ID NO: 66 - DNA, 1600 bp, Homo sapiens
gccccgccgccggcagtggaccgctgtgcgcgaaccctgaaccctacggtcccgacccgcgggcgaggccgggtacctgggctgggatccggagcaagcgggcgagggcagcgccctaagcaggcccggagcgatggcagccttgatgaccccgggaaccggggccccacccgcgcctggtgacttctccggggaagggagccagggacttcccgacccttcgccagagcccaagcagctcccggagctgatccgcatgaagcgagacggaggccgcctgagcgaagcggacatcaggggcttcgtggccgctgtggtgaatgggagcgcgcagggcgcacagatcggggccatgctgatggccatccgacttcggggcatggatctggaggagacctcggtgctgacccaggccctggctcagtcgggacagcagctggagtggccagaggcctggcgccagcagcttgtggacaagcattccacagggggtgtgggtgacaaggtcagcctggtcctcgcacctgccctggcggcatgtggctgcaaggtgccaatgatcagcggacgtggtctggggcacacaggaggcaccttggataagctggagtctattcctggattcaatgtcatccagagcccagagcagatgcaagtgctgctggaccaggcgggctgctgtatcgtgggtcagagtgagcagctggttcctgcggacggaatcctatatgcagccagagatgtgacagccaccgtggacagcctgccactcatcacagcctccattctcagtaagaaactcgtggaggggctgtccgctctggtggtggacgttaagttcggaggggccgccgtcttccccaaccaggagcaggcccgggagctggcaaagacgctggttggcgtgggagccagcctagggcttcgggtcgcggcagcgctgaccgccatggacaagcccctgggtcgctgcgtgggccacgccctggaggtggaggaggcgctgctctgcatggacggcgcaggcccgccagacttaagggacctggtcaccacgctcgggggcgccctgctctggctcagcggacacgcggggactcaggctcagggcgctgcccgggtggccgcggcgctggacgacggctcggcccttggccgcttcgagcggatgctggcggcgcagggcgtggatcccggtctggcccgagccctgtgctcgggaagtcccgcagaacgccggcagctgctgcctcgcgcccgggagcaggaggagctgctggcgcccgcagatggcaccgtggagctggtccgggcgctgccgctggcgctggtgctgcacgagctcggggccgggcgcagccgcgctggggagccgctccgcctgggggtgggcgcagagctgctggtcgacgtgggtcagaggctgcgccgtgggaccccctggctccgcgtgcaccgggacggccccgcgctcagcggcccgcagagccgcgccctgcaggaggcgctcgtactctccgaccgcgcgccattcgccgccccctcgcccttcgcagagctcgttctgccgccgcagcaataaagctcctttgccgcgaaa

SEQ ID NO: 67 - protein, 482 aa, Homo sapiens
MAALMTPGTGAPPAPGDFSGEGSQGLPDPSPEPKQLPELIRMKRDGGRLSEADIRGFVAAVVNGSAQGAQIGAMLMAIRLRGMDLEETSVLTQALAQSGQQLEWPEAWRQQLVDKHSTGGVGDKVSLVLAPALAACGCKVPMISGRGLGHTGGTLDKLESIPGFNVIQSPEQMQVLLDQAGCCIVGQSEQLVPADGILYAARDVTATVDSLPLITASILSKKLVEGLSALVVDVKFGGAAVFPNQEQARELAKTLVGVGASLGLRVAAALTAMDKPLGRCVGHALEVEEALLCMDGAGPPDLRDLVTTLGGALLWLSGHAGTQAQGAARVAAALDDGSALGRFERMLAAQGVDPGLARALCSGSPAERRQLLPRAREQEELLAPADGTVELVRALPLALVLHELGAGRSRAGEPLRLGVGAELLVDVGQRLRRGTPWLRVHRDGPALSGPQSRALQEALVLSDRAPFAAPSPFAELVLPPQQ

SEQ ID NO: 68 - DNA, 1530 bp, Homo sapiens
agtggctctactttcagaagaaagtgtctctcttcctgcttaaacctctgtctctgacggtccctgccaatcgctctggtcgaccccaacacactaggaggacagacacaggctccaaactccactaaccagagctgtgattgtgcccgctgagtggactgcgttgtcagggagtgagtgctccatcatcgggagaatccaagcaggaccgccatggaggaaggtcaatattcagagatcgaggagcttcccaggaggcggtgttgcaggcgtgggactcagatcgtgctgctggggctggtgaccgccgctctgtgggctgggctgctgactctgcttctcctgtggcactgggacaccacacagagtctaaaacagctggaagagagggctgcccggaacgtctctcaagtttccaagaacttggaaagccaccacggtgaccagatggcgcagaaatcccagtccacgcagatttcacaggaactggaggaacttcgagctgaacagcagagattgaaatctcaggacttggagctgtcctggaacctgaacgggcttcaagcagatctgagcagcttcaagtcccaggaattgaacgagaggaacgaagcttcagatttgctggaaagactccgggaggaggtgacaaagctaaggatggagttgcaggtgtccagcggctttgtgtgcaacacgtgccctgaaaagtggatcaatttccaacggaagtgctactacttcggcaagggcaccaagcagtgggtccacgcccggtatgcctgtgacgacatggaagggcagctggtcagcatccacagcccggaggagcaggacttcctgaccaagcatgccagccacaccggctcctggattggccttcggaacttggacctgaagggagagtttatctgggtggatgggagccatgtggactacagcaactgggctccaggggagcccaccagccggagccagggcgaggactgcgtgatgatgcggggctccggtcgctggaacgacgccttctgcgaccgtaagctgggcgcctgggtgtgcgaccggctggccacatgcacgccgccagccagcgaaggttccgcggagtccatgggacctgattcaagaccagaccctgacggccgcctgcccaccccctctgcccctctccactcttgagcatggatacagccaggcccagagcaagaccctgaagacccccaaccacggcctaaaagcctctttgtggctgaaaggtccctgtgacattttctgccacccaaacggaggcagctgacacatctcccgctcctctatggcccctgccttcccaggagtacaccccaacagcaccctctccagatgggagtgcccccaacagcaccctctccagatgagagtacaccccaacagcaccctctccagatgcagccccatctcctcagcaccccaggacctgagtatccccagctcaggtggtgagtcctcctgtccagcctgcatcaataaaatggggcagtgatggcctcc

SEQ ID NO: 69 - protein, 321 aa, Homo sapiens
MEEGQYSEIEELPRRRCCRRGTQIVLLGLVTAALWAGLLTLLLLWHWDTTQSLKQLEERAARNVSQVSKNLESHHGDQMAQKSQSTQISQELEELRAEQQRLKSQDLELSWNLNGLQADLSSFKSQELNERNEASDLLERLREEVTKLRMELQVSSGFVCNTCPEKWINFQRKCYYFGKGTKQWVHARYACDDMEGQLVSIHSPEEQDFLTKHASHTGSWIGLRNLDLKGEFIWVDGSHVDYSNWAPGEPTSRSQGEDCVMMRGSGRWNDAFCDRKLGAWVCDRLATCTPPASEGSAESMGPDSRPDPDGRLPTPSAPLHS

SEQ ID NO: 70 - DNA, 982 bp, Homo sapiens
agacaattttcagcaggaagaagtagaaaggataaaatggatcctgcaccacgggaacctcacagcacctcacttcttttggttttctttctctttggggcacctctggactcactccccagcatgaaggcgctgagcccggtgcgcggctgctacgaggcggtgtgctgcctgtcggaacgcagtctggccatcgcccggggccgagggaagggcccggcagctgaggagccgctgagcttgctggacgacatgaaccactgctactcccgcctgcgggaactggtacccggagtcccgagaggcactcagcttagccaggtggaaatcctacagcgcgtcatcgactacattctcgacctgcaggtagtcctggccgagccagcccctggaccccctgatggcccccaccttcccatccagacagccgagctcgctccggaacttgtcatctccaacgacaaaaggagcttttgccactgactcggccgtgtcctgacacctccagaacgcaggtgctggcgcccgttctgcctgggaccccgggaacctctcctgccggaagccggacggcagggatgggccccaacttcgccctgcccacttgacttcaccaaatcccttcctggagactgaacctggtgctcaggagcgaaggactgtgaacttgtggcctgaagagccagagctagctctggccaccagctgggcgacgtcaccctgctcccaccccaccccaagttctaaggtcttttcagagcgtggaggtgtggaaggagtggctgctctccaaactatgccaaggcggcggcagagctggtcttctggtctccttggagaaaggttctgttgccctgatttatgaactctataatagagtatataggttttgtaccttttttacaggaaggtgactttctgtaacaatgcgatgtatattaaactttttataaaagttaacattttgcataataaacgattt

SEQ ID NO: 71 - protein, 148 aa, Homo sapiens
MDPAPREPHSTSLLLVFFLFGAPLDSLPSMKALSPVRGCYEAVCCLSERSLAIARGRGKGPAAEEPLSLLDDMNHCYSRLRELVPGVPRGTQLSQVEILQRVIDYILDLQVVLAEPAPGPPDGPHLPIQTAELAPELVISNDKRSFCH

SEQ ID NO: 72 - DNA, 6928 bp, Homo sapiens
ggcgggagcgcgtgcgcccgaggacccggccggaaggcttgcgccagctcaggatgaggacaggctgggcgacccctcgccgcccggcggggctcctcatgctgctcttctggttcttcgatctcgcggagccctctggccgcgcagctaatgaccccttcaccatcgtccatggaaatacgggcaagtgcatcaagccagtgtatggctggatagtagcagacgactgtgatgaaactgaggacaagttatggaagtgggtgtcccagcatcggctctttcatttgcactcccaaaagtgccttggcctcgatattaccaaatcggtaaatgagctgagaatgttcagctgtgactccagtgccatgctgtggtggaaatgtgagcaccactctctgtacggagctgcccggtaccggctggctctgaaggatggacatggcacagcaatctcaaatgcatctgatgtctggaagaaaggaggctcagaggaaagcctttgtgaccagccttatcatgagatctataccagagatgggaactcttatgggagaccttgtgaatttccattcttaattgatgggacctggcatcatgattgcattcttgatgaagatcatagtgggccatggtgtgccaccaccttaaattatgaatatgaccgaaagtggggcatctgcttaaagcctgaaaacggttgtgaagataattgggaaaagaacgagcagtttggaagttgctaccaatttaatactcagacggctctttcttggaaagaagcttatgtttcatgtcagaatcaaggagctgatttactgagcatcaacagtgctgctgaattaacttaccttaaagaaaaagaaggcattgctaagattttctggattggtttaaatcagctatactctgctagaggctgggaatggtcagaccacaaaccattaaactttctcaactgggatccagacaggcccagtgcacctactataggtggctccagctgtgcaagaatggatgctgagtctggtctgtggcagagcttttcctgtgaagctcaactgccctatgtctgcaggaaaccattaaataatacagtggagttaacagatgtctggacatactcagatacccgctgtgatgcaggctggctgccaaataatggattttgctatctgctggtaaatgaaagtaattcctgggataaggcacatgcgaaatgcaaagccttcagtagtgacctaatcagcattcattctctagcagatgtggaggtggttgtcacaaaactccataatgaggatatcaaagaagaagtgtggataggccttaagaacataaacataccaactttatttcagtggtcagatggtactgaagttactctaacatattgggatgagaatgagccaaatgttccctacaataagacgcccaactgtgtttcctacttaggagagctaggtcagtggaaagtccaatcatgtgaggagaaactaaaatatgtatgcaagagaaagggagaaaaactgaatgacgcaagttctgataagatgtgtcctccagatgagggctggaagagacatggagaaacctgttacaagatttatgaggatgaggtcccttttggaacaaactgcaatctgactatcactagcagatttgagcaagaatacctaaatgatttgatgaaaaagtatgataaatctctaagaaaatacttctggactggcctgagagatgtagattcttgtggagagtataactgggcaactgttggtggaagaaggcgggctgtaaccttttccaactggaattttcttgagccagcttccccgggcggctgcgtggctatgtctactggaaagtctgttggaaagtgggaggtgaaggactgcagaagcttcaaagcactttcaatttgcaagaaaatgagtggaccccttgggcctgaagaagcatcccctaagcctgatgacccctgtcctgaaggctggcagagtttccccgcaagtctttcttgttataaggtattccatgcagaaagaattgtaagaaagaggaactgggaagaagctgaacgattctgccaagcccttggagcacacctttctagcttcagccatgtggatgaaataaaggaatttcttcactttttaacggaccagttcagtggccagcattggctgtggattggtttgaataaaaggagcccagatttacaaggatcctggcaatggagtgatcgtacaccagtgtctactattatcatgccaaatgagtttcagcaggattatgacatcagagactgtgctgctgtcaaggtatttcataggccatggcgaagaggctggcatttctatgatgatagagaatttatttatttgaggccttttgcttgtgatacaaaacttgaatgggtgtgccaaattccaaaaggccgtactccaaaaacaccagactggtacaatccagaccgtgctggaattcatggacctccacttataattgaaggaagtgaatattggtttgttgctgatcttcacctaaactatgaagaagccgtcctgtactgtgccagcaatcacagctttcttgcgactataacatcttttgtgggactaaaagccatcaaaaacaaaatagcaaatatatctggtgatggacagaagtggtggataagaattagcgagtggccaatagatgatcattttacatactcacgatatccatggcaccgctttcctgtgacatttggagaggaatgcttgtacatgtctgccaagacttggcttatcgacttaggtaaaccaacagactgtagtaccaagttgcccttcatctgtgaaaaatataatgtttcttcgttagagaaatacagcccagattctgcagctaaagtgcaatgttctgagcaatggattccttttcagaataagtgttttctaaagatcaaacccgtgtctctcacattttctcaagcaagcgatacctgtcactcctatggtggcacccttccttcagtgttgagccagattgaacaagactttattacatccttgcttccggatatggaagctactttatggattggtttgcgctggactgcctatgaaaagataaacaaatggacagataacagagagctgacgtacagtaactttcacccattattggttagtgggaggctgagaataccagaaaatttttttgaggaagagtctcgctaccactgtgccctaatactcaacctccaaaaatcaccgtttactgggacgtggaattttacatcctgcagtgaacgccactttgtgtctctctgtcagaaatattcagaagttaaaagcagacagacgttgcagaatgcttcagaaactgtaaagtatctaaataatctgtacaaaataatcccaaagactctgacttggcacagtgctaaaagggagtgtctgaaaagtaacatgcagctggtgagcatcacggacccttaccagcaggcattcctcagtgtgcaggcgctccttcacaactcttccttatggatcggactcttcagtcaagatgatgaactcaactttggttggtcagatgggaaacgtcttcattttagtcgctgggctgaaactaatgggcaactcgaagactgtgtagtattagacactgatggattctggaaaacagttgattgcaatgacaatcaaccaggtgctatttgctactattcaggaaatgagactgaaaaagaggtcaaaccagttgacagtgttaaatgtccatctcctgttctaaatactccgtggataccatttcagaactgttgctacaatttcataataacaaagaataggcatatggcaacaacacaggatgaagttcatactaaatgccagaaactgaatccaaaatcacatattctgagtattcgagatgaaaaggagaataactttgttcttgagcaactgctgtacttcaattatatggcttcatgggtcatgttaggaataacttatagaaataattctcttatgtggtttgataagaccccactgtcatatacacattggagagcaggaagaccaactataaaaaatgagaagtttttggctggtttaagtactgacggcttctgggatattcaaacctttaaagttattgaagaagcagtttattttcaccagcacagcattcttgcttgtaaaattgaaatggttgactacaaagaagaacataatactacactgccacagtttatgccatatgaagatggtatttacagtgttattcaaaaaaaggtaacatggtatgaagcattaaacatgtgttctcaaagtggaggtcacttggcaagcgttcacaaccaaaatggccagctctttctggaagatattgtaaaacgtgatggatttccactatgggttgggctctcaagtcatgatggaagtgaatcaagttttgaatggtctgatggtagtacatttgactatatcccatggaaaggccaaacatctcctggaaattgtgttctcttggatccaaaaggaacttggaaacatgaaaaatgcaactctgttaaggatggtgctatttgttataaacctacaaaatctaaaaagctgtcccgtcttacatattcatcaagatgtccagcagcaaaagagaatgggtcacggtggatccagtacaagggtcactgttacaagtctgatcaggcattgcacagtttttcagaggccaaaaaattgtgttcaaaacatgatcactctgcaactatcgtttccataaaagatgaagatgagaataaatttgtgagcagactgatgagggaaaataataacattaccatgagagtttggcttggattatctcaacattctgttgaccagtcttggagttggttagatggatcagaagtgacatttgtcaaatgggaaaataaaagtaagagtggtgttggaagatgtagcatgttgatagcttcaaatgaaacttggaaaaaagttgaatgtgaacatggttttggaagagttgtctgcaaagtgcctctgggccctgattacacagcaatagctatcatagttgccacactaagtatcttagttctcatgggcggactgatttggttcctcttccaaaggcaccgtttgcacctggcgggtttctcatcagttcgatatgcacaaggagtgaatgaagatgagattatgcttccttctttccatgactaaattcttctaaaagttttctaatttgcactaatgtggttatggagaaattagtcacttaaaatgtcccagtgtcagtatttactctgctccaaagtagaactcttaaatactttttcagttgtttagatcttaggcatgtgctggtatccacagttaattccctgctaaatgccatgtttatcaccctaattaatagaatggaggggactccaaagctggaactgaagtccaaattgtttgtacagtaatatgtttaatgttcattttctctgtatgaatgtgattggtaactaggatatgtatattttaatagaatttttaacaaaacttcttagaaaattaaaataggcatattactaggtgacatgtctactttttaatttttaagagcatccggccaaatgcaaaattagtacctcaaagtaaaaattgaactgtaaactctatcagcattgtttcaaaatagtcatttttagcactggggaaaaataaacaataagacatgcttactttttaatttttatttttttgagactgagtctctctctgttgcccaggctggagtacaatggcgtgatctcggctcactgcaaatctccgcctcccaggttcaagcgattctcctgcctcagcctcctgagtagctgggattacaggcaactgccaccatgcccggctaatttttgtatttttagtagagatggggtttcaccatgttggccaggctggtctcgaactcgtgaccgcagtgatcctcccgcctcggcctcccaaagtgctgggattacaggcatgagccaccgcgcctggcctctgcttactttttatatagcaaaatgattccccttggcaagatgtttcttatattattccaaagttatttcataccattattatgtaaatatgaagagtttttttctgtttataattgtttataaaacaatgacttttaaagatttagtgcttaacattttcccaagtgtgggaacattatttttagattgagtaggtaccttgtagcagtgtgctttgcattttctgatgtattacatgactgtttcttttgtaaagagaatcaactaggtatttaagactgataattttacaatttatatgcttcacatagcatgtcaacttttgactaagaattttgttttacttttttaacatgtgttaaacagagaaagggtccatgaaggaaagtgtatgagttgcatttgtaaaaatgagactttttcagtggaactctaaaccttgtgatgactactaacaaatgtaaaattatgagtgattaagaaaacattgctttgtggttatcactttaagttttgacacctagattatagtcttagtaatagcatccactggaaaaggtgaaaatgttttattcagcatttaacttacatttgtactttagagtatttttgtataaaatccatagatttattttacatttagagtatttacactatgataaagttgtaaataattttctaagacagtttttatatagtctacagttgtcctgatttcttattgaatttgttagactagttctcttgtcttgtgatctgtgtacaattttagtcactaagactttcctccaagaactaagccaacttgatgtgaaaagcacggctgtatataatggtgatgtcataataaagttgttttatcttttaagtaaaaaaaaaaaaaaaaaaaaa

SEQ ID NO: 73 - protein, 1722 aa, Homo sapiens
MRTGWATPRRPAGLLMLLFWFFDLAEPSGRAANDPFTIVHGNTGKCIKPVYGWIVADDCDETEDKLWKWVSQHRLFHLHSQKCLGLDITKSVNELRMFSCDSSAMLWWKCEHHSLYGAARYRLALKDGHGTAISNASDVWKKGGSEESLCDQPYHEIYTRDGNSYGRPCEFPFLIDGTWHHDCILDEDHSGPWCATTLNYEYDRKWGICLKPENGCEDNWEKNEQFGSCYQFNTQTALSWKEAYVSCQNQGADLLSINSAAELTYLKEKEGIAKIFWIGLNQLYSARGWEWSDHKPLNFLNWDPDRPSAPTIGGSSCARMDAESGLWQSFSCEAQLPYVCRKPLNNTVELTDVWTYSDTRCDAGWLPNNGFCYLLVNESNSWDKAHAKCKAFSSDLISIHSLADVEVVVTKLHNEDIKEEVWIGLKNINIPTLFQWSDGTEVTLTYWDENEPNVPYNKTPNCVSYLGELGQWKVQSCEEKLKYVCKRKGEKLNDASSDKMCPPDEGWKRHGETCYKIYEDEVPFGTNCNLTITSRFEQEYLNDLMKKYDKSLRKYFWTGLRDVDSCGEYNWATVGGRRRAVTFSNWNFLEPASPGGCVAMSTGKSVGKWEVKDCRSFKALSICKKMSGPLGPEEASPKPDDPCPEGWQSFPASLSCYKVFHAERIVRKRNWEEAERFCQALGAHLSSFSHVDEIKEFLHFLTDQFSGQHWLWIGLNKRSPDLQGSWQWSDRTPVSTIIMPNEFQQDYDIRDCAAVKVFHRPWRRGWHFYDDREFIYLRPFACDTKLEWVCQIPKGRTPKTPDWYNPDRAGIHGPPLIIEGSEYWFVADLHLNYEEAVLYCASNHSFLATITSFVGLKAIKNKIANISGDGQKWWIRISEWPIDDHFTYSRYPWHRFPVTFGEECLYMSAKTWLIDLGKPTDCSTKLPFICEKYNVSSLEKYSPDSAAKVQCSEQWIPFQNKCFLKIKPVSLTFSQASDTCHSYGGTLPSVLSQIEQDFITSLLPDMEATLWIGLRWTAYEKINKWTDNRELTYSNFHPLLVSGRLRIPENFFEEESRYHCALILNLQKSPFTGTWNFTSCSERHFVSLCQKYSEVKSRQTLQNASETVKYLNNLYKIIPKTLTWHSAKRECLKSNMQLVSITDPYQQAFLSVQALLHNSSLWIGLFSQDDELNFGWSDGKRLHFSRWAETNGQLEDCVVLDTDGFWKTVDCNDNQPGAICYYSGNETEKEVKPVDSVKCPSPVLNTPWIPFQNCCYNFIITKNRHMATTQDEVHTKCQKLNPKSHILSIRDEKENNFVLEQLLYFNYMASWVMLGITYRNNSLMWFDKTPLSYTHWRAGRPTIKNEKFLAGLSTDGFWDIQTFKVIEEAVYFHQHSILACKIEMVDYKEEHNTTLPQFMPYEDGIYSVIQKKVTWYEALNMCSQSGGHLASVHNQNGQLFLEDIVKRDGFPLWVGLSSHDGSESSFEWSDGSTFDYIPWKGQTSPGNCVLLDPKGTWKHEKCNSVKDGAICYKPTKSKKLSRLTYSSRCPAAKENGSRWIQYKGHCYKSDQALHSFSEAKKLCSKHDHSATIVSIKDEDENKFVSRLMRENNNITMRVWLGLSQHSVDQSWSWLDGSEVTFVKWENKSKSGVGRCSMLIASNETWKKVECEHGFGRVVCKVPLGPDYTAIAIIVATLSILVLMGGLIWFLFQRHRLHLAGFSSVRYAQGVNEDEIMLPSFHD

SEQ ID NO: 74 - DNA, 2808 bp, Homo sapiens
gcggcggcggcggcgcagtttgctcatactttgtgacttgcggtcacagtggcattcagctccacacttggtagaaccacaggcacgacaagcatagaaacatcctaaacaatcttcatcgaggcatcgaggtccatcccaataaaaatcaggagaccctggctatcatagaccttagtcttcgctggtatactcgctgtctgtcaaccagcggttgactttttttaagccttcttttttctcttttaccagtttctggagcaaattcagtttgccttcctggatttgtaaattgtaatgacctcaaaactttagcagttcttccatctgactcaggtttgcttctctggcggtcttcagaatcaacatccacacttccgtgattatctgcgtgcattttggacaaagcttccaaccaggatacgggaagaagaaatggctggtgatctttcagcaggtttcttcatggaggaacttaatacataccgtcagaagcagggagtagtacttaaatatcaagaactgcctaattcaggacctccacatgataggaggtttacatttcaagttataatagatggaagagaatttccagaaggtgaaggtagatcaaagaaggaagcaaaaaatgccgcagccaaattagctgttgagatacttaataaggaaaagaaggcagttagtcctttattattgacaacaacgaattcttcagaaggattatccatggggaattacataggccttatcaatagaattgcccagaagaaaagactaactgtaaattatgaacagtgtgcatcgggggtgcatgggccagaaggatttcattataaatgcaaaatgggacagaaagaatatagtattggtacaggttctactaaacaggaagcaaaacaattggccgctaaacttgcatatcttcagatattatcagaagaaacctcagtgaaatctgactacctgtcctctggttcttttgctactacgtgtgagtcccaaagcaactctttagtgaccagcacactcgcttctgaatcatcatctgaaggtgacttctcagcagatacatcagagataaattctaacagtgacagtttaaacagttcttcgttgcttatgaatggtctcagaaataatcaaaggaaggcaaaaagatctttggcacccagatttgaccttcctgacatgaaagaaacaaagtatactgtggacaagaggtttggcatggattttaaagaaatagaattaattggctcaggtggatttggccaagttttcaaagcaaaacacagaattgacggaaagacttacgttattaaacgtgttaaatataataacgagaaggcggagcgtgaagtaaaagcattggcaaaacttgatcatgtaaatattgttcactacaatggctgttgggatggatttgattatgatcctgagaccagtgatgattctcttgagagcagtgattatgatcctgagaacagcaaaaatagttcaaggtcaaagactaagtgccttttcatccaaatggaattctgtgataaagggaccttggaacaatggattgaaaaaagaagaggcgagaaactagacaaagttttggctttggaactctttgaacaaataacaaaaggggtggattatatacattcaaaaaaattaattcatagagatcttaagccaagtaatatattcttagtagatacaaaacaagtaaagattggagactttggacttgtaacatctctgaaaaatgatggaaagcgaacaaggagtaagggaactttgcgatacatgagcccagaacagatttcttcgcaagactatggaaaggaagtggacctctacgctttggggctaattcttgctgaacttcttcatgtatgtgacactgcttttgaaacatcaaagtttttcacagacctacgggatggcatcatctcagatatatttgataaaaaagaaaaaactcttctacagaaattactctcaaagaaacctgaggatcgacctaacacatctgaaatactaaggaccttgactgtgtggaagaaaagcccagagaaaaatgaacgacacacatgttagagcccttctgaaaaagtatcctgcttctgatatgcagttttccttaaattatctaaaatctgctagggaatatcaatagatatttaccttttattttaatgtttcctttaattttttactatttttactaatctttctgcagaaacagaaaggttttcttctttttgcttcaaaaacattcttacattttactttttcctggctcatctctttattcttttttttttttttaaagacagagtctcgctctgttgcccaggctggagtgcaatgacacagtcttggctcactgcaacttctgcctcttgggttcaagtgattctcctgcctcagcctcctgagtagctggattacaggcatgtgccacccacccaactaatttttgtgtttttaataaagacagggtttcaccatgttggccaggctggtctcaaactcctgacctcaagtaatccacctgcctcggcctcccaaagtgctgggattacagggatgagccaccgcgcccagcctcatctctttgttctaaagatggaaaaaccacccccaaattttctttttatactattaatgaatcaatcaattcatatctatttattaaatttctaccgcttttaggccaaaaaaatgtaagatcgttctctgcctcacatagcttacaagccagctggagaaatatggtactcattaaaaaaaaaaaaaaagtgatgtacaacc

SEQ ID NO: 75 - protein, 551 aa, Homo sapiens
MAGDLSAGFFMEELNTYRQKQGVVLKYQELPNSGPPHDRRFTFQVIIDGREFPEGEGRSKKEAKNAAAKLAVEILNKEKKAVSPLLLTTTNSSEGLSMGNYIGLINRIAQKKRLTVNYEQCASGVHGPEGFHYKCKMGQKEYSIGTGSTKQEAKQLAAKLAYLQILSEETSVKSDYLSSGSFATTCESQSNSLVTSTLASESSSEGDFSADTSEINSNSDSLNSSSLLMNGLRNNQRKAKRSLAPRFDLPDMKETKYTVDKRFGMDFKEIELIGSGGFGQVFKAKHRIDGKTYVIKRVKYNNEKAEREVKALAKLDHVNIVHYNGCWDGFDYDPETSDDSLESSDYDPENSKNSSRSKTKCLFIQMEFCDKGTLEQWIEKRRGEKLDKVLALELFEQITKGVDYIHSKKLIHRDLKPSNIFLVDTKQVKIGDFGLVTSLKNDGKRTRSKGTLRYMSPEQISSQDYGKEVDLYALGLILAELLHVCDTAFETSKFFTDLRDGIISDIFDKKEKTLLQKLLSKKPEDRPNTSEILRTLTVWKKSPEKNERHTC

SEQ ID NO: 76 - DNA, 1591 bp, Homo sapiens
ggcacgaggattcgctgctccgcagcacggccggagctggtccggtcaagagtcgggatttgtggggagaggttttccactggtcaagagaaggctttaagaaagacggtattaatctcccgttgcggctcccgcctggtcccatcttctgcccgctcctccaggaaatgaatctgctgccgaatattgagagtccagtgactcggcaggagaagatggcgaccgtgtgggatgaggccgagcaagatggaattggggaggaggtgctcaagatgtccacggaggagatcatccagcgcacacggctgctggacagtgagatcaagatcatgaagagtgaagtgttgagagtcacccatgagctccaagccatgaaggacaagataaaagagaacagtgagaaaatcaaagtgaacaagaccctgccgtaccttgtctccaacgtcatcgagctcctggatgttgatcctaatgaccaagaggaggatggtgccaatattgacctggactcccagaggaagggcaagtgtgctgtgatcaaaacctctacacgacagacgtacttccttcctgtgattgggttggtggatgctgaaaagctaaagccaggagacctggtgggtgtgaacaaagactcctatctgatcctggagacgctgcccacagagtatgactcgcgggtgaaggccatggaggtagacgagaggcccacggagcaatacagtgacattgggggtttggacaagcagatccaggagctggtggaggccattgtcttgccaatgaaccacaaggagaagtttgagaacttggggatccaacctccaaaaggggtgctgatgtatgggcccccagggacggggaagaccctcctggcccgggcctgtgccgcacagactaaggccaccttcctaaagctggctggcccccagctggtgcagatgttcattggagatggtgccaagctagtccgggatgcctttgccctggccaaggagaaagcgccctctatcatcttcattgatgagttggatgccatcggcaccaagcgctttgacagtgagaaggctggggaccgggaggtgcagaggacaatgctggagcttctgaaccagctggatggcttccagcccaacacccaagttaaggtaattgcagccacaaacagggtggacatcctggaccccgccctcctccgctcgggccgccttgaccgcaagatagagttcccgatgcccaatgaggaggcccgggccagaatcatgcagatccactcccgaaagatgaatgtcagtcctgacgtgaactacgaggagctggcccgctgcacagatgacttcaatggggcccagtgcaaggctgtgtgtgtggaggcgggcatgatcgcactgcgcaggggtgccacggagctcacccacgaggactacatggaaggcatcctggaggtgcaggccaagaagaaagccaacctacaatactacgcctagggcacacaggccagccccagtctcacggctgaagtgcgcaataaaagatggtttagggtccctgccaaaaaaaaaaaaaaaaaaaaaaaaaaaaaaaaaaaaaa

SEQ ID NO: 77 - protein, 439 aa, Homo sapiens
MNLLPNIESPVTRQEKMATVWDEAEQDGIGEEVLKMSTEEIIQRTRLLDSEIKIMKSEVLRVTHELQAMKDKIKENSEKIKVNKTLPYLVSNVIELLDVDPNDQEEDGANIDLDSQRKGKCAVIKTSTRQTYFLPVIGLVDAEKLKPGDLVGVNKDSYLILETLPTEYDSRVKAMEVDERPTEQYSDIGGLDKQIQELVEAIVLPMNHKEKFENLGIQPPKGVLMYGPPGTGKTLLARACAAQTKATFLKLAGPQLVQMFIGDGAKLVRDAFALAKEKAPSIIFIDELDAIGTKRFDSEKAGDREVQRTMLELLNQLDGFQPNTQVKVIAATNRVDILDPALLRSGRLDRKIEFPMPNEEARARIMQIHSRKMNVSPDVNYEELARCTDDFNGAQCKAVCVEAGMIALRRGATELTHEDYMEGILEVQAKKKANLQYYA

SEQ ID NO: 78 - DNA, 3314 bp, Homo sapiens
ggaggcaggcggtgccgcggcgccgggacccgactcatccggtgcttgcgtgtggtggtgagcgcagcgccgaggatgaggaggtgcaacagcggctccgggccgccgccgtcgctgctgctgctgctgctgtggctgctcgcggttcccggcgctaacgcggccccgcggtcggcgctctattcgccttccgacccgctgacgctgctgcaggcggacacggtgcgcggcgcggtgctgggctcccgcagcgcctgggccgtggagttcttcgcctcctggtgcggccactgcatcgccttcgccccgacgtggaaggcgctggccgaagacgtcaaagcctggaggccggccctgtatctcgccgccctggactgtgctgaggagaccaacagtgcagtctgcagagacttcaacatccctggcttcccgactgtgaggttcttcaaggcctttaccaagaacggctcgggagcagtatttccagtggctggtgctgacgtgcagacgctgcgggagaggctcattgacgccctggagtcccatcatgacacgtggcccccagcctgtcccccactggagcctgccaagctggaggagattgatggattctttgcgagaaataacgaagagtacctggctctgatctttgaaaagggaggctcctacctgggtagagaggtggctctggacctgtcccagcacaaaggcgtggcggtgcgcagggtgctgaacacagaggccaatgtggtgagaaagtttggtgtcaccgacttcccctcttgctacctgctgttccggaatggctctgtctcccgagtccccgtgctcatggaatccaggtccttctataccgcttacctgcagagactctctgggctcaccagggaggctgcccagaccacagttgcaccaaccactgctaacaagatagctcccactgtttggaaattggcagatcgctccaagatctacatggctgacctggaatctgcactgcactacatcctgcggatagaagtgggcaggttcccggtcctggaagggcagcgcctggtggccctgaaaaagtttgtggcagtgctggccaagtatttccctggccggcccttagtccagaacttcctgcactccgtgaatgaatggctcaagaggcagaagagaaataaaattccctacagtttctttaaaactgccctggacgacaggaaagagggtgccgttcttgccaagaaggtgaactggattggctgccaggggagtgagccgcatttccggggctttccctgctccctgtgggtcctcttccacttcttgactgtgcaggcagctcggcaaaatgtagaccactcacaggaagcagccaaggccaaggaggtcctcccagccatccgaggctacgtgcactacttcttcggctgccgagactgcgctagccacttcgagcagatggctgctgcctccatgcaccgggtggggagtcccaacgccgctgtcctctggctctggtctagccacaacagggtcaatgctcgccttgcaggtgcccccagcgaggacccccagttccccaaggtgcagtggccaccccgtgaactttgttctgcctgccacaatgaacgcctggatgtgcccgtgtgggacgtggaagccaccctcaacttcctcaaggcccacttctccccaagcaacatcatcctggacttccctgcagctgggtcagctgcccggagggatgtgcagaatgtggcagccgccccagagctggcgatgggagccctggagctggaaagccggaattcaactctggaccctgggaagcctgagatgatgaagtcccccacaaacaccaccccacatgtgccggctgagggacctgaggcaagtcgacccccgaagctgcaccctggcctcagagctgcaccaggccaggagcctcctgagcacatggcagagcttcagaggaatgagcaggagcagccgcttgggcagtggcacttgagcaagcgagacacaggggctgcattgctggctgagtccagggctgagaagaaccgcctctggggccctttggaggtcaggcgcgtgggccgcagctccaagcagctggtcgacatccctgagggccagctggaggcccgagctggacggggccgaggccagtggctgcaggtgctgggagggggcttctcttacctggacatcagcctctgtgtggggctctattccctgtccttcatgggcctgctggccatgtacacctacttccaggccaagataagggccctgaagggccatgctggccaccctgcagcctgaaccacctggggaggaggcgggagagggagctgccatctctaggcacctcaagccccctgaccccattccctcccctcccaccccttgctccttgtctggcctagaagtgtgggaaattcaggaaaacgagttgctccagtgaagcttcttggggttgctaggacagagagctcctttgacacaaaagacaggagcagggtccaggttcccctgctgtgcagggagggcagccccgggcagtgggcatagggcagctcagtccctggcctcttagcaccacattcctgtttttcagcttatttgaagtcctgcctcattctcactggagcctcagtctctcctgcttggtcttggccctcaactggggcaagtgaagccagaggagggtcccccagctgggtgggctggaatggaactcctcactagctgctggggctccgcccaccctgctcccttccggacaatgaagaagcctttgcaccctgggaggaaggaccaccccgggccctctatgcctggccagcctccagctcctcagacctcctgggtggggtttggcttcagggtggggtttggaagcttctggaagtcgtgctggtctcccaggtgaggcaagccatggttgctgggctgtagggtgagtggcttgcttggtgggacctgacgagttggtggcatgggaaggatgtgggtctctagtgccttgccctggcttagctgcaggagaagatggctgctttcacttccccccattgagctctgctccctctgagcctggtcttttgtccttttttattttggtctccaagatgaatgctcatctttggagggtgccaggtagaagctagggaggggagtgtcttctctctccaggtttcaccttccagtgtgcagaagttagaagggtctggcgggggcagtgccttacacatgcttgattcccacgctaccccctgccttgggaggtgtgtggaataaattatttttgttaaggc

SEQ ID NO: 79 - protein, 747 aa, Homo sapiens
MRRCNSGSGPPPSLLLLLLWLLAVPGANAAPRSALYSPSDPLTLLQADTVRGAVLGSRSAWAVEFFASWCGHCIAFAPTWKALAEDVKAWRPALYLAALDCAEETNSAVCRDFNIPGFPTVRFFKAFTKNGSGAVFPVAGADVQTLRERLIDALESHHDTWPPACPPLEPAKLEEIDGFFARNNEEYLALIFEKGGSYLGREVALDLSQHKGVAVRRVLNTEANVVRKFGVTDFPSCYLLFRNGSVSRVPVLMESRSFYTAYLQRLSGLTREAAQTTVAPTTANKIAPTVWKLADRSKIYMADLESALHYILRIEVGRFPVLEGQRLVALKKFVAVLAKYFPGRPLVQNFLHSVNEWLKRQKRNKIPYSFFKTALDDRKEGAVLAKKVNWIGCQGSEPHFRGFPCSLWVLFHFLTVQAARQNVDHSQEAAKAKEVLPAIRGYVHYFFGCRDCASHFEQMAAASMHRVGSPNAAVLWLWSSHNRVNARLAGAPSEDPQFPKVQWPPRELCSACHNERLDVPVWDVEATLNFLKAHFSPSNIILDFPAAGSAARRDVQNVAAAPELAMGALELESRNSTLDPGKPEMMKSPTNTTPHVPAEGPEASRPPKLHPGLRAAPGQEPPEHMAELQRNEQEQPLGQWHLSKRDTGAALLAESRAEKNRLWGPLEVRRVGRSSKQLVDIPEGQLEARAGRGRGQWLQVLGGGFSYLDISLCVGLYSLSFMGLLAMYTYFQAKIRALKGHAGHPAA

SEQ ID NO: 80 - DNA, 776 bp, Homo sapiens
aaggacacgggcagcagacagtggtcagtcctttcttggctctgctgacactcgagcccacattccgtcacctgctcagaatcatgcaggtctccactgctgcccttgctgtcctcctctgcaccatggctctctgcaaccagttctctgcatcacttgctgctgacacgccgaccgcctgctgcttcagctacacctcccggcagattccacagaatttcatagctgactactttgagacgagcagccagtgctccaagcccggtgtcatcttcctaaccaagcgaagccggcaggtctgtgctgaccccagtgaggagtgggtccagaaatatgtcagcgacctagagctgagtgcctgaggggtccagaagcttcgaggcccagcgacctcggtgggccagtggggaggagcaggagcctgagccttgggaaacatgcgtgtgacctccacagctacctcttctatggactggttgttgccaaacagccacactgtgggactcttcttaacttaaattttaatttatttatactatttagtttttgtaatttattttcgatttcacagtgtgtttgtgattgtttgctctgagagttcccctgtcccctcccccttccctcacaccgcgtctggtgacaaccgagtggctgtcatcagcctgtgtaggcagtcatggcaccaaagccaccagactgacaaatgtgtatcggatgcttttgttcagggctgtgatcggcctggggaaataataaagcacgctcttttaaaaggt

SEQ ID NO: 81 - protein, 92 aa, Homo sapiens
MQVSTAALAVLLCTMALCNQFSASLAADTPTACCFSYTSRQIPQNFIADYFETSSQCSKPGVIFLTKRSRQVCADPSEEWVQKYVSDLELSA

SEQ ID NO: 82 - DNA, 696 bp, Homo sapiens
ttccccccccccccccccccccccgcccgagcacaggacacagctgggttctgaagcttctgagttctgcagcctcacctctgagaaaacctcttttccaccaataccatgaagctctgcgtgactgtcctgtctctcctcatgctagtagctgccttctgctctccagcgctctcagcaccaatgggctcagaccctcccaccgcctgctgcttttcttacaccgcgaggaagcttcctcgcaactttgtggtagattactatgagaccagcagcctctgctcccagccagctgtggtattccaaaccaaaagaagcaagcaagtctgtgctgatcccagtgaatcctgggtccaggagtacgtgtatgacctggaactgaactgagctgctcagagacaggaagtcttcagggaaggtcacctgagcccggatgcttctccatgagacacatctcctccatactcaggactcctctccgcagttcctgtcccttctcttaatttaatcttttttatgtgccgtgttattgtattaggtgtcatttccattatttatattagtttagccaaaggataagtgtcctatggggatggtccactgtcactgtttctctgctgttgcaaatacatggataacacatttgattctgtgtgttttccataataaaactttaaaataaaatgcagacagtta

SEQ ID NO: 83 - protein, 92 aa, Homo sapiens
MKLCVTVLSLLMLVAAFCSPALSAPMGSDPPTACCFSYTARKLPRNFVVDYYETSSLCSQPAVVFQTKRSKQVCADPSESWVQEYVYDLELN

SEQ ID NO: 84 - DNA, 538 bp, Homo sapiens
ccctgagcagagggacctgcacacagagactccctcctgggctcctggcaccatggccccactgaagatgctggccctggtcaccctcctcctgggggcttctctgcagcacatccacgcagctcgagggaccaatgtgggccgggagtgctgcctggagtacttcaagggagccattccccttagaaagctgaagacgtggtaccagacatctgaggactgctccagggatgccatcgtttttgtaactgtgcagggcagggccatctgttcggaccccaacaacaagagagtgaagaatgcagttaaatacctgcaaagccttgagaggtcttgaagcctcctcaccccagactcctgactgtctcccgggactacctgggacctccaccgttggtgttcaccgcccccaccctgagcgcctgggtccaggggaggccttccagggacgaagaagagccacagtgagggagatcccatccccttgtctgaactggagccatgggcacaaagggcccagattaaagtctttatcctc

SEQ ID NO: 85 - protein, 94 aa, Homo sapiens
MAPLKMLALVTLLLGASLQHIHAARGTNVGRECCLEYFKGAIPLRKLKTWYQTSEDCSRDAIVFVTVQGRAICSDPNNKRVKNAVKYLQSLERS

SEQ ID NO: 86 - DNA, 932 bp, Homo sapiens
atacaggacagagcatggctcgcctacagactgcactcctggttgtcctcgtcctccttgctgtggcgcttcaagcaactgaggcaggcccctacggcgccaacatggaagacagcgtctgctgccgtgattacgtccgttaccgtctgcccctgcgcgtggtgaaacacttctactggacctcagactcctgcccgaggcctggcgtggtgttgctaaccttcagggataaggagatctgtgccgatcccagagtgccctgggtgaagatgattctcaataagctgagccaatgaagagcctactctgatgaccgtggccttggctcctccaggaaggctcaggagccctacctccctgccattatagctgctccccgccagaagcctgtgccaactctctgcattccctgatctccatccctgtggctgtcacccttggtcacctccgtgctgtcactgccatctcccccctgacccctctaacccatcctctgcctccctccctgcagtcagagggtcctgttcccatcagcgattcccctgcttaaacccttccatgactccccactgccctaagctgaggtcagtctcccaagcctggcatgtggccctctggatctgggttccatctctgtctccagcctgcccacttcccttcatgaatgttgggttctagctccctgttctccaaacccatactacacatcccacttctgggtctttgcctgggatgttgctgacactcagaaagtcccaccacctgcacatgtgtagccccaccagccctccaaggcattgctcgcccaagcagctggtaattccatttcatgtattagatgtcccctggccctctgtcccctcttaataaccctagtcacagtctccgcagattcttgggatttgggggttttctcccccacctctccacta

SEQ ID NO: 87 - protein, 93 aa, Homo sapiens
MARLQTALLVVLVLLAVALQATEAGPYGANMEDSVCCRDYVRYRLPLRVVKHFYWTSDSCPRPGVVLLTFRDKEICADPRVPWVKMILNKLSQ

SEQ ID NO: 88 - DNA, 1789 bp, Homo sapiens
ggttcaggaacctgctggttctgatacataaatcagacagcctctgctgcatgacacgaagcttgcttctgcctggcatctgtgagcagctgccaggctccggccaggatcccttccttctcctcattggctgatggatcccaaggggctcctctccttgaccttcgtgctgtttctctccctggcttttggggcaagctacggaacaggtgggcgcatgatgaactgcccaaagattctccggcagttgggaagcaaagtgctgctgcccctgacatatgaaaggataaataagagcatgaacaaaagcatccacattgtcgtcacaatggcaaaatcactggagaacagtgtcgagaacaaaatagtgtctcttgatccatccgaagcaggccctccacgttatctaggagatcgctacaagttttatctggagaatctcaccctggggatacgggaaagcaggaaggaggatgagggatggtaccttatgaccctggagaaaaatgtttcagttcagcgcttttgcctgcagttgaggctttatgagcaggtctccactccagaaattaaagttttaaacaagacccaggagaacgggacctgcaccttgatactgggctgcacagtggagaagggggaccatgtggcttacagctggagtgaaaaggcgggcacccacccactgaacccagccaacagctcccacctcctgtccctcaccctcggcccccagcatgctgacaatatctacatctgcaccgtgagcaaccctatcagcaacaattcccagaccttcagcccgtggcccggatgcaggacagacccctcagaaacaaaaccatgggcagtgtatgctgggctgttagggggtgtcatcatgattctcatcatggtggtaatactacagttgagaagaagaggtaaaacgaaccattaccagacaacagtggaaaaaaaaagccttacgatctatgcccaagtccagaaaccaggtcctcttcagaagaaacttgactccttcccagctcaggacccttgcaccaccatatatgttgctgccacagagcctgtcccagagtctgtccaggaaacaaattccatcacagtctatgctagtgtgacacttccagagagctgacaccagagaccaacaaagggactttctgaaggaaaatggaaaaaccaaaatgaacactgaacttggccacaggcccaagtttcctctggcagacatgctgcacgtctgtacccttctcagatcaactccctggtgatgtttcttccacatacatctgtgaaatgaacaaggaagtgaggcttcccaagaatttagcttgctgtgcagtggctgcaggcgcagaacagagcgttacttgataacagcgttccatctttgtgttgtagcagatgaaatggacagtaatgtgagttcagactttgggcatcttgctcttggctggaactgataataaaaatcagactgaaagccaggacatctgagtacctatctcacacactgaccaccagtcacaaagtctggaaaagtttacattttggctatctttactttgttctgggagctgatcatgataacctgcagacctgatcaagcctctgtgcctcagtttctctctcaggataaagagtgaatagaggccgaagggtgaatttcttattatacataaaacactctgatattattgtataaaggaagctaagaatattattttatttgcaaaacccagaagctaaaaagtcaataaacagaaagaatgattttgagaaa

SEQ ID NO: 89 - protein, 335 aa, Homo sapiens
MDPKGLLSLTFVLFLSLAFGASYGTGGRMMNCPKILRQLGSKVLLPLTYERINKSMNKSIHIVVTMAKSLENSVENKIVSLDPSEAGPPRYLGDRYKFYLENLTLGIRESRKEDEGWYLMTLEKNVSVQRFCLQLRLYEQVSTPEIKVLNKTQENGTCTLILGCTVEKGDHVAYSWSEKAGTHPLNPANSSHLLSLTLGPQHADNIYICTVSNPISNNSQTFSPWPGCRTDPSETKPWAVYAGLLGGVIMILIMVVILQLRRRGKTNHYQTTVEKKSLTIYAQVQKPGPLQKKLDSFPAQDPCTTIYVAATEPVPESVQETNSITVYASVTLPES

SEQ ID NO: 90 - DNA, 2277 bp, Homo sapiens
acgccctatacaacttggcttcacatacttttacactaactttatatgatttttaaaaactggtctgatcggacttctcgtcctgggacactgtttactggagtctggccggctctccgtgctcctcttggtacctcattttggggagaaccttaaacccactcgagcagataatctccgccttgaccggtgccaccaaagaagggttggaaccatgtggacttttctgggcattgccactttcacctatttttataagaagttcggggacttcatcactttggccaacagggaggtcctgttgtgcgtgctggtgttcctctcgctgggcctggtgctctcctaccgctgtcgccaccgaaacgggggtctcctcgggcgccagcggagcggctcccagttcgccctcttctcggatattctctcaggcctgcctttcattggcttcttctgggccaaatccccccctgaatcagaaaataaggagcagctcggggccaggaggcgcagaaaaggaaccaatatttcagaaacaagcttaataggaacagctgcctgtacatcaacatcttctcagaatgacccagaagttatcatcgtgggagctggcgtgcttggctctgctttggtagctgtgctttccagagatggaagaaaggtgacagtcattgagagagacttaaaagagcctgacagaatagttggagaattcctgcagccgggtggttatcatgttctcaaagaccttggtcttggagatacagtggaaggtcttgatgcccaggttgtaaatggttacatgattcatgatcaggaaagcaaatcagaggttcagattccttaccctctgtcagaaaacaatcaagtgcagagtggaagagctttccatcacggaagattcatcatgagtctccggaaagcagctatggcagagcccaatgcaaagtttattgaaggtgttgtgttacagttattagaggaagatgatgttgtgatgggagttcagtacaaggataaagagactggagatatcaaggaactccatgctccactgactgttgttgcagatgggcttttctccaagttcaggaaaagcctggtctccaataaagtttctgtatcatctcattttgttggctttcttatgaagaatgcaccacagtttaaagcaaatcatgctgaacttattttagctaacccgagtccagttctcatctaccggatttcatccagtgaaactcgagtacttgttgacattagaggagaaatgccaaggaatttaagagaatacatggttgaaaaaatttacccacaaatacctgatcacctgaaagaaccattcttagaagccactgacaattctcatctgaggtccatgctagcaagcttccttcctccttcatcagtgaagaaacgaggtgttcttcttttgggagacgcatataatatgaggcatccacttactggtggaggaatgactgttgcttttaaagatataaaactatggagaaaactgctaaagggtatccctgacctttatgatgatgcagctattttcgaggccaacaaatcattttactgggcaagaaaaacatctcattcctttgtcgtgaatatccttgctcaggctctttatgaattattttctgccacagatgattccctgcatcaactaagaaaagcctgttttctttatttcaaacttggtggcgaatgtgttgcgggtcctgttgggctgctttctgtattgtctcctaaccctctagctttaattggacacttctttgctgttgcaatctatgccgtgtatttttgctttaagtcagaaccttggattacaaaacctcgagcccttctcagtagtagtgctgtattgtacaaagcgtgttctgtaatatttcctctaatttactcagaaatgaagtatatggttcattaagcttaaaggggaaccatttgtgaatgaatatttggaacttaccaagtcctaagagacttttggaagaggatatatatagcatagtaccataccacttataaagtggaaactcttggaccaagatttggattaatttgtttttgaagttttttgtatataaatatgtaaatacatgctttaatttgcaatttaaaatgaaggggttaaataagttagacatttgaaagaaatgattgttaccataaattagtgctaatgctgaggagaactacagtttttcttttgaatttagtatttgagatgagttgttgggacatgcaaataaaatgaagaatgac

SEQ ID NO: 91 - protein, 574 aa, Homo sapiens
MWTFLGIATFTYFYKKFGDFITLANREVLLCVLVFLSLGLVLSYRCRHRNGGLLGRQRSGSQFALFSDILSGLPFIGFFWAKSPPESENKEQLGARRRRKGTNISETSLIGTAACTSTSSQNDPEVIIVGAGVLGSALVAVLSRDGRKVTVIERDLKEPDRIVGEFLQPGGYHVLKDLGLGDTVEGLDAQVVNGYMIHDQESKSEVQIPYPLSENNQVQSGRAFHHGRFIMSLRKAAMAEPNAKFIEGVVLQLLEEDDVVMGVQYKDKETGDIKELHAPLTVVADGLFSKFRKSLVSNKVSVSSHFVGFLMKNAPQFKANHAELILANPSPVLIYRISSSETRVLVDIRGEMPRNLREYMVEKIYPQIPDHLKEPFLEATDNSHLRSMLASFLPPSSVKKRGVLLLGDAYNMRHPLTGGGMTVAFKDIKLWRKLLKGIPDLYDDAAIFEANKSFYWARKTSHSFVVNILAQALYELFSATDDSLHQLRKACFLYFKLGGECVAGPVGLLSVLSPNPLALIGHFFAVAIYAVYFCFKSEPWITKPRALLSSSAVLYKACSVIFPLIYSEMKYMVH

SEQ ID NO: 92 - DNA, 2761 bp, Homo sapiens
agaggacgcccggtgaaggggctccagcctggcagtttctgcgtgttagcatttctagaatagagtgggtgggaactgacccaagtaaagtcccagagactcgaacactgacgcacaggaaagcctcaagtgggaggagaaatgcaaatcccctactgatgatggcgtcagcggctttctcctagggactgtgaggggcgcttctgactttggacttgagcactgcctgggacctgtgctgagagagcgctagcatgtctcagtggaatcaagtccaacagttagaaatcaagtttttggagcaggtggatcaattctatgatgacaactttcccatggaaattcggcatctgttggcccaatggattgaaaatcaagactgggaggcagcttctaacaatgaaaccatggcaacgattcttcttcaaaacttgttaatacaactggatgaacagttaggtcgtgtttccaaagagaaaaacctactcttgatacacaatctaaaaagaattaggaaggtccttcagggaaaatttcatggaaatccaatgcatgtagctgtggttatttcaaactgtttaagggaagagaggagaatattggctgcagccaacatgcctgtccaggggcctctagagaaatccttacaaagttcttcagtttcagaaagacagaggaatgtggagcacaaagtggctgccattaaaaacagtgtgcagatgacagaacaagataccaaatacttagaagatctgcaagacgaatttgactacaggtataaaacaattcagacaatggatcagagtgacaagaatagtgccatggtgaatcaggaagttttgacactgcaggaaatgcttaacagcctcgatttcaagagaaaggaggctctcagtaaaatgacccaaatcatccatgagacagacctgttaatgaacaccatgctcatagaagagctgcaagactggaagcggcggcagcaaatcgcctgcatcgggggtccactccacaatgggctcgaccagcttcagaactgctttacactattggcagaaagtcttttccaactgagaaggcaattggagaaactagaggagcaatctaccaaaatgacatatgaaggtgatcccattccaatgcaaagaactcacatgctagaaagagtcaccttcttgatctacaaccttttcaagaactcatttgtggttgagcgacagccatgtatgccaacccaccctcagaggccgttggtacttaaaaccctaattcagttcactgtaaaactaaggctactaataaaattgccagaactaaactatcaggtaaaggttaaggcatcaattgacaagaatgtttcaactctaagcaaccgaagatttgtactttgtggaactaatgtcaaagccatgtctattgaagaatcttccaatgggagtctctcagtagaatttcgacatttgcaaccaaaggaaatgaagtccagtgctggaggtaaaggaaatgagggctgtcacatggtgactgaagaacttcattccataacgtttgaaacacagatctgcctctatggcctgaccatagatttggagaccagctcattgcctgtggtgatgatttccaatgtcagtcagttacctaatgcttgggcatccatcatttggtacaacgtgtcaaccaacgattcccagaacttggttttctttaataatcctccacctgccacattgagtcaactactggaggtgatgagctggcagttttcatcgtacgttggtcgtggtcttaactcagatcaactccatatgctggcagagaagcttacagtccaatctagctacagtgatggtcacctcacctgggccaagttctgcaaggaacatttacctggtaaatcatttaccttttggacatggcttgaagcaatattggatctaattaagaaacacattcttcccctttggattgatgggtatgtcatgggctttgttagcaaagagaaggaacggctgttgctaaaggataaaatgcctggcacctttttattaagattcagtgaaagccatctcggaggaataactttcacctgggtggaccattctgaaagtggggaagtgagattccactctgtagaaccctacaataaaggccggttgtctgctctgccattcgctgacatcctgcgagactacaaagttattatggctgaaaacattcctgaaaaccctctgaagtacctatatcctgacattcccaaagacaaagccttcggtaaacactacagctctcagccttgcgaagtttcaagaccaacagaaaggggtgacaaaggttatgttccttctgtttttatccccatctcaacaatccgaagtgattcaacagagccacattctccatcagaccttcttcccatgtctccaagtgtgtatgcggtgttgagagaaaacctgagtcccacaacaattgaaactgcaatgaagtctccttattctgctgaatgacaggataaactctgacgcaccaagaaaggaagcaaatgaaaaagtttaaagactgttctttgcccaataaccacattttatttcttcagctttgtaaataccaggttctaggaaatgtttgacatctgaagctctcttcacactcccgtggcactcctcaattgggagtgttgtgactgaaatgcttgaaaccaaagcttcagataaacttgcaagataagacaactttaagaaaccagtgttaataacaatattaacag

SEQ ID NO: 93 - protein, 748 aa, Homo sapiens
MSQWNQVQQLEIKFLEQVDQFYDDNFPMEIRHLLAQWIENQDWEAASNNETMATILLQNLLIQLDEQLGRVSKEKNLLLIHNLKRIRKVLQGKFHGNPMHVAVVISNCLREERRILAAANMPVQGPLEKSLQSSSVSERQRNVEHKVAAIKNSVQMTEQDTKYLEDLQDEFDYRYKTIQTMDQSDKNSAMVNQEVLTLQEMLNSLDFKRKEALSKMTQIIHETDLLMNTMLIEELQDWKRRQQIACIGGPLHNGLDQLQNCFTLLAESLFQLRRQLEKLEEQSTKMTYEGDPIPMQRTHMLERVTFLIYNLFKNSFVVERQPCMPTHPQRPLVLKTLIQFTVKLRLLIKLPELNYQVKVKASIDKNVSTLSNRRFVLCGTNVKAMSIEESSNGSLSVEFRHLQPKEMKSSAGGKGNEGCHMVTEELHSITFETQICLYGLTIDLETSSLPVVMISNVSQLPNAWASIIWYNVSTNDSQNLVFFNNPPPATLSQLLEVMSWQFSSYVGRGLNSDQLHMLAEKLTVQSSYSDGHLTWAKFCKEHLPGKSFTFWTWLEAILDLIKKHILPLWIDGYVMGFVSKEKERLLLKDKMPGTFLLRFSESHLGGITFTWVDHSESGEVRFHSVEPYNKGRLSALPFADILRDYKVIMAENIPENPLKYLYPDIPKDKAFGKHYSSQPCEVSRPTERGDKGYVPSVFIPISTIRSDSTEPHSPSDLLPMSPSVYAVLRENLSPTTIETAMKSPYSAE

SEQ ID NO: 94 - DNA, 3734 bp, Homo sapiens
caaatgcgaacttaggctgttacacaactgctggggtctgttctcgccgcccgcccggcagtcaggcagcgtcgccgccgtggtagcagcctcagccgtttctggagtctcgggcccacagtcaccgccgcttacctgcgcctcctcgagcctccggagtccccgtccgcccgcacaggccggttcgccgtctgcgtctcccccacgccgcctcgcctgccgccgcgctcgtccctccgggccgacatgagtggggaccacctccacaacgattcccagatcgaagcggatttccgattgaatgattctcataaacacaaagataaacacaaagatcgagaacaccggcacaaagaacacaagaaggagaaggaccgggaaaagtccaagcatagcaacagtgaacataaagattctgaaaagaaacacaaagagaaggagaagaccaaacacaaagatggaagctcagaaaagcataaagacaaacataaagacagagacaaggaaaaacgaaaagaggaaaaggttcgagcctctggggatgcaaaaataaagaaggagaaggaaaatggcttctctagtccaccacaaattaaagatgaacctgaagatgatggctattttgttcctcctaaagaggatataaagccattaaagagacctcgagatgaggatgatgctgattataaacctaagaaaattaaaacagaagataccaagaaggagaagaaaagaaaactagaagaagaagaggatggtaaattgaaaaaacccaagaataaagataaagataaaaaagttcctgagccagataacaagaaaaagaagccgaagaaagaagaggaacagaagtggaaatggtgggaagaagagcgctatcctgaaggcatcaagtggaaattcctagaacataaaggtccagtatttgccccaccatatgagcctcttccagagaatgtcaagttttattatgatggtaaagtcatgaagctgagccccaaagcagaggaagtagctacgttctttgcaaaaatgctcgaccatgaatatactaccaaggaaatatttaggaaaaatttctttaaagactggagaaaggaaatgactaatgaagagaagaatattatcaccaacctaagcaaatgtgattttacccagatgagccagtatttcaaagcccagacggaagctcggaaacagatgagcaaggaagagaaactgaaaatcaaagaggagaatgaaaaattactgaaagaatatggattctgtattatggataaccacaaagagaggattgctaacttcaagatagagcctcctggacttttccgtggccgcggcaaccaccccaagatgggcatgctgaagagacgaatcatgcccgaggatataatcatcaactgtagcaaagatgccaaggttccttctcctcctccaggacataagtggaaagaagtccggcatgataacaaggttacttggctggtttcctggacagagaacatccaaggttccattaaatacatcatgcttaaccctagttcacgaatcaagggtgagaaggactggcagaaatacgagactgctcggcggctgaaaaaatgtgtggacaagatccggaaccagtatcgagaagactggaagtccaaagagatgaaagtccggcagagagctgtagccctgtacttcatcgacaagcttgctctgagagcaggcaatgaaaaggaggaaggagaaacagcggacactgtgggctgctgctcacttcgtgtggagcacatcaatctacacccagagttggatggtcaggaatatgtggtagagtttgacttcctcgggaaggactccatcagatactataacaaggtccctgttgagaaacgagtttttaagaacctacaactatttatggagaacaagcagcccgaggatgatctttttgatagactcaatactggtattctgaataagcatcttcaggatctcatggagggcttgacagccaaggtattccgtacatacaatgcctccatcacgctacagcagcagctaaaagaactgacagccccggatgagaacatcccagcgaagatcctttcttataaccgtgccaatcgagctgttgcaattctttgtaaccatcagagggcaccaccaaaaacttttgagaagtctatgatgaacttgcaaactaagattgatgccaagaaggaacagctagcagatgcccggagagacctgaaaagtgctaaggctgatgccaaggtcatgaaggatgcaaagacgaagaaggtagtagagtcaaagaagaaggctgttcagagactggaggaacagttgatgaagctggaagttcaagccacagaccgagaggaaaataaacagattgccctgggaacctccaaactcaattatctggaccctaggatcacagtggcttggtgcaagaagtggggtgtcccaattgagaagatttacaacaaaacccagcgggagaagtttgcctgggccattgacatggctgatgaagactatgagttttagccagtctcaagaggcagagttctgtgaagaggaacagtgtggtttgggaaagatggataaactgagcctcacttgccctcgtgcctgggggagagaggcagcaagtcttaacaaaccaacatctttgcgaaaagataaacctggagatattataagggagagctgagccagttgtcctatggacaacttatttaaaaatatttcagatatcaaaattctagctgtatgatttgttttgaattttgtttttattttcaagagggcaagtggatgggaatttgtcagcgttctaccaggcaaattcactgtttcactgaaatgtttggattctcttagctactgtatgcaaagtccgattatattggtgcgtttttacagttagggttttgcaataacttctatattttaatagaaataaattcctaaactcccttccctctctcccatttcaggaatttaaaattaagtagaacaaaaaacccagcgcacctgttagagtcgtcactctctattgtcatggggatcaattttcattaaacttgaagcagtcgtggctttggcagtgttttggttcagacacctgttcacagaaaaagcatgatgggaaaatatttcctgacttgagtgttcctttttaaatgtgaatttttatttctttttaattattttaaaatatttaaacctttttcttgatcttaaagatcgtgtagattggggttggggagggatgaagggcgagtgaatctaaggataatgaaataatcagtgactgaaaccattttcccatcatcctttgttctgagcattcgctgtaccctttaagatatccatctttttctttttaaccctaatctttcacttgaaagattttattgtataaaaagtttcacaggtcaataaacttagaggaaaatgagtatttggtccaaaaaaaggaaaaataatcaagattttagggcttttattttttcttttgtaattgtgtaaaaaatggaaaaaaacataaaaagcagaattttaatgtgaagacattttttgctataatcattagttttagaggcattgttagtttagtgtgtgtgcagagtccatttcccacatctttcctcaagtatcttctatttttatcatgaattcccttttaatcaactgtaggttatttaaaataaattcctacaacttaatggaaa

SEQ ID NO: 95 - protein, 765 aa, Homo sapiens
MSGDHLHNDSQIEADFRLNDSHKHKDKHKDREHRHKEHKKEKDREKSKHSNSEHKDSEKKHKEKEKTKHKDGSSEKHKDKHKDRDKEKRKEEKVRASGDAKIKKEKENGFSSPPQIKDEPEDDGYFVPPKEDIKPLKRPRDEDDADYKPKKIKTEDTKKEKKRKLEEEEDGKLKKPKNKDKDKKVPEPDNKKKKPKKEEEQKWKWWEEERYPEGIKWKFLEHKGPVFAPPYEPLPENVKFYYDGKVMKLSPKAEEVATFFAKMLDHEYTTKEIFRKNFFKDWRKEMTNEEKNIITNLSKCDFTQMSQYFKAQTEARKQMSKEEKLKIKEENEKLLKEYGFCIMDNHKERIANFKIEPPGLFRGRGNHPKMGMLKRRIMPEDIIINCSKDAKVPSPPPGHKWKEVRHDNKVTWLVSWTENIQGSIKYIMLNPSSRIKGEKDWQKYETARRLKKCVDKIRNQYREDWKSKEMKVRQRAVALYFIDKLALRAGNEKEEGETADTVGCCSLRVEHINLHPELDGQEYVVEFDFLGKDSIRYYNKVPVEKRVFKNLQLFMENKQPEDDLFDRLNTGILNKHLQDLMEGLTAKVFRTYNASITLQQQLKELTAPDENIPAKILSYNRANRAVAILCNHQRAPPKTFEKSMMNLQTKIDAKKEQLADARRDLKSAKADAKVMKDAKTKKVVESKKKAVQRLEEQLMKLEVQATDREENKQIALGTSKLNYLDPRITVAWCKKWGVPIEKIYNKTQREKFAWAIDMADEDYEF

SEQ ID NO: 96 - DNA, 501 bp, Homo sapiens
gaattcgctttggatccatttccatcggtccttacagccgctcgtcagactccagcagccaagatggtgaagcagatcgagagcaagactgcttttcaggaagccttggacgctgcaggtgataaacttgtagtagttgacttctcagccacgtggtgtgggccttgcaaaatgatcaaccctttctttcattccctctctgaaaagtattccaacgtgatattccttgaagtagatgtggatgactgtcaggatgttgcttcagagtgtgaagtcaaatgcacgccaacattccagttttttaagaagggacaaaaggtgggtgaattttctggagccaataaggaaaagcttgaagccaccattaatgaattagtctaatcatgttttctgaaaacataaccagccattggctatttaaacttgtatttttttatttacaaaatataaatatgaagacataaccagttgccatctgcgtgacaataaacattatgctaa

SEQ ID NO: 97 - protein, 105 aa, Homo sapiens
MVKQIESKTAFQEALDAAGDKLVVVDFSATWCGPCKMINPFFHSLSEKYSNVIFLEVDVDDCQDVASECEVKCTPTFQFFKKGQKVGEFSGANKEKLEATINELV

SEQ ID NO: 98 - DNA, 1806 bp, Homo sapiens
gccgctcgctcggctccgctccctggctcggctccctgcctccgcgtcgcagcccccgccgtagccgcctccgagcccgccgccacatcctctgagaagatggctgtgccacccacgtatgccgatcttggcaaatctgccagggatgtcttcaccaagggctatggatttggcttaataaagcttgatttgaaaacaaaatctgagaatggattggaatttacaagctcaggctcagccaacactgagaccaccaaagtgacgggcagtctggaaaccaagtacagatggactgagtacggcctgacgtttacagagaaatggaataccgacaatacactaggcaccgagattactgtggaagatcagcttgcacgtggactgaagctgaccttcgattcatccttctcacctaacactgggaaaaaaaatgctaaaatcaagacagggtacaagcgggagcacattaacctgggctgcgacatggatttcgacattgctgggccttccatccggggtgctctggtgctaggttacgagggctggctggccggctaccagatgaattttgagactgcaaaatcccgagtgacccagagcaactttgcagttggctacaagactgatgaattccagcttcacactaatgtgaatgacgggacagagtttggcggctccatttaccagaaagtgaacaagaagttggagaccgctgtcaatcttgcctggacagcaggaaacagtaacacgcgcttcggaatagcagccaagtatcagattgaccctgacgcctgcttctcggctaaagtgaacaactccagcctgataggtttaggatacactcagactctaaagccaggtattaaactgacactgtcagctcttctggatggcaagaacgtcaatgctggtggccacaagcttggtctaggactggaatttcaagcataaatgaatactgtacaattgtttaattttaaactattttgcagcatagctaccttcagaatttagtgtatcttttaatgttgtatgtctgggatgcaagtattgctaaatatgttagccctccaggttaaagttgattcagctttaagatgttacccttccagaggtacagaagaaacctatttccaaaaaaggtcctttcagtggtagactcggggagaacttggtggcccctttgagatgccaggtttcttttttatctagaaatggctgcaagtggaagcggataatatgtaggcactttgtaaattcatattgagtaaatgaatgaaattgtgatttcctgagaatcgaaccttggttccctaaccctaattgatgagaggctcgctgcttgatggtgtgtacaaactcacctgaatgggacttttttagacagatcttcatgacctgttcccaccccagttcatcatcatctcttttacaccaaaaggtctgcagggtgtggtaactgtttcttttgtgccattttggggtggagaaggtggatgtgatgaagccaataattcaggacttattccttcttgtgttgtgtttttttttggcccttgcaccagagtatgaaatagcttccaggagctccagctataagcttggaagtgtctgtgtgattgtaatcacatggtgacaacactcagaatctaaattggacttctgttgtattctcaccactcaatttgttttttagcagtttaatgggtacattttagagtcttccattttgttggaattagatcctccccttcaaatgctgtaattaacaacacttaaaaaacttgaataaaatattgaaacctc

SEQ ID NO: 99 - protein, 283 aa, Homo sapiens
MAVPPTYADLGKSARDVFTKGYGFGLIKLDLKTKSENGLEFTSSGSANTETTKVTGSLETKYRWTEYGLTFTEKWNTDNTLGTEITVEDQLARGLKLTFDSSFSPNTGKKNAKIKTGYKREHINLGCDMDFDIAGPSIRGALVLGYEGWLAGYQMNFETAKSRVTQSNFAVGYKTDEFQLHTNVNDGTEFGGSIYQKVNKKLETAVNLAWTAGNSNTRFGIAAKYQIDPDACFSAKVNNSSLIGLGYTQTLKPGIKLTLSALLDGKNVNAGGHKLGLGLEFQA

SEQ ID NO: 100 - DNA, 647 bp, Homo sapiens
gctcactgagcaccgtcccagcatccggacaccacagcggcccttcgctccacgcagaaaaccacacttctcataccttcactcaacacttccttccccaaagccagaagatgcacaaggaggaacatgaggtggctgtgctgggggcaccccccagcaccatccttccaaggtccaccgtgattaacatccacagcgagacctccgtgcccgaccatgtcgtctggtccctgttcaacaccctcttcttgaactggtgctgtctgggcttcatagcattcgcctactccgtaaagtctagggacaggaagatggttggcgacgtgaccggggcccaggcctatgcctccaccgccaagtgcctgaacatctgggccctgattctgggcatcctcatgaccattggattcatcctgttactggtattcggctctgtaacagtctaccatattatgttacagataatacaggaaaaacggggttactagtagccgcccatagcctgcaacctttgcactccactgtgcaatgctggccctgcacgctggggctgttgcccctgcccccttggtcctgcccctagatacagcagtttatacccacacacctgtctacagtgtcattcaataaagtgcacgtgcttgtga

SEQ ID NO: 101 - protein, 125 aa, Homo sapiens
MHKEEHEVAVLGAPPSTILPRSTVINIHSETSVPDHVVWSLFNTLFLNWCCLGFIAFAYSVKSRDRKMVGDVTGAQAYASTAKCLNIWALILGILMTIGFILLLVFGSVTVYHIMLQIIQEKRGY

SEQ ID NO: 102 - DNA, 2922 bp, Homo sapiens
ggacaccgggccatgcacgcccccaactgaagctgcatctcaaagccgaagattccagcagcccaggggatttcaaagagctcagactcagaggaacatctgcggagagacccccgaagccctctccagggcagtcctcatccagacgctccgctagtgcagacaggagcgcgcagtggccccggctcgccgcgccatggagcggatccccagcgcgcaaccaccccccgcctgcctgcccaaagcaccgggactggagcacggagacctaccagggatgtaccctgcccacatgtaccaagtgtacaagtcaagacggggaataaagcggagcgaggacagcaaggagacctacaaattgccgcaccggctcatcgagaaaaagagacgtgaccggattaacgagtgcatcgcccagctgaaggatctcctacccgaacatctcaaacttacaactttgggtcacttggaaaaagcagtggttcttgaacttaccttgaagcatgtgaaagcactaacaaacctaattgatcagcagcagcagaaaatcattgccctgcagagtggtttacaagctggtgagctgtcagggagaaatgtcgaaacaggtcaagagatgttctgctcaggtttccagacatgtgcccgggaggtgcttcagtatctggccaagcacgagaacactcgggacctgaagtcttcgcagcttgtcacccacctccaccgggtggtctcggagctgctgcagggtggtacctccaggaagccatcagacccagctcccaaagtgatggacttcaaggaaaaacccagctctccggccaaaggttcggaaggtcctgggaaaaactgcgtgccagtcatccagcggactttcgctcactcgagtggggagcagagcggcagcgacacggacacagacagtggctatggaggagaatcggagaagggcgacttgcgcagtgagcagccgtgcttcaaaagtgaccacggacgcaggttcacgatgggagaaaggatcggcgcaattaagcaagagtccgaagaaccccccacaaaaaagaaccggatgcagctttcggatgatgaaggccatttcactagcagtgacctgatcagctccccgttcctgggcccacacccacaccagcctcctttctgcctgcccttctacctgatcccaccttcagcgactgcctacctgcccatgctggagaagtgctggtatcccacctcagtgccagtgctatacccaggcctcaacgcctctgccgcagccctctctagcttcatgaacccagacaagatctcggctcccttgctcatgccccagagactcccttctcccttgccagctcatccgtccgtcgactcttctgtcttgctccaagctctgaagccaatcccccctttaaacttagaaaccaaagactaaactctctaggggatcctgctgctttgctttccttcctcgctacttcctaaaaagcaacaaaaaagtttttgtgaatgctgcaagattgttgcattgtgtatactgagataatctgaggcatggagagcagattcagggtgtgtgtgtgtgtgtgtgtgtgtgtgtgtatgtgcgtgtgcgtgcacatgtgtgcctgcgtgttggtataggactttaaagctccttttggcatagggaagtcacgaaggattgcttgacatcaggagacttgggggggattgtagcagacgtctgggcttttccccacccagagaatagcccccttcgatacacatcagctggattttcaaaagcttcaaagtcttggtctgtgagtcactcttcagtttgggagctgggtctgtggctttgatcagaaggtactttcaaaagagggctttccagggctcagctcccaaccagctgttaggaccccacccttttgcctttattgtcgacgtgactcaccagacgtcggggagagagagcagtcagaccgagctttctgctaacatggggaggtagcaggcactggcatagcacggtagtggtttggggaggtttccgcaggtctgctccccacccctgcctcggaagaataaagagaatgtagttccctactcaggctttcgtagtgattagcttactaaggaactgaaaatgggccccttgtacaagctgagctgccccggagggagggaggagttccctgggcttctggcacctgtttctaggcctaaccattagtacttactgtgcagggaaccaaaccaaggtctgagaaatgcggacaccccgagcgagcaccccaaagtgcacaaagctgagtaaaaagctgcccccttcaaacagaactagactcagttttcaattccatcctaaaactccttttaaccaagcttagcttctcaaaggcctaaccaagccttggcaccgccagatcctttctgtaggctaattcctcttgcccaacggcatatggagtgtccttattgctaaaaaggattccgtctccttcaaagaagttttatttttggtccagagtacttgttttcccgatgtgtccagccagctccgcagcagcttttcaagatgcactatgcctgattgctgatcgtgttttaactttttcttttcctgtttttattttggtattaagtcgttgcctttatttgtaaagctgttataaatatatattatataaatatattaaaaaggaaaatgtttcagatgtttatttgtataattacttgattcacacagtgagaaaaaatgaatgtattcctgtttttgaagagaagaataatttttttttctctagggagaggtacagtgtttatattttggagccttcctgaaggtgtaaaattgtaaatatttttatctatgagtaaatgttaagtagttgttttaaaatacttaataaaataattcttttcctgtggaag

SEQ ID NO: 103 - protein, 412 aa, Homo sapiens
MERIPSAQPPPACLPKAPGLEHGDLPGMYPAHMYQVYKSRRGIKRSEDSKETYKLPHRLIEKKRRDRINECIAQLKDLLPEHLKLTTLGHLEKAVVLELTLKHVKALTNLIDQQQQKIIALQSGLQAGELSGRNVETGQEMFCSGFQTCAREVLQYLAKHENTRDLKSSQLVTHLHRVVSELLQGGTSRKPSDPAPKVMDFKEKPSSPAKGSEGPGKNCVPVIQRTFAHSSGEQSGSDTDTDSGYGGESEKGDLRSEQPCFKSDHGRRFTMGERIGAIKQESEEPPTKKNRMQLSDDEGHFTSSDLISSPFLGPHPHQPPFCLPFYLIPPSATAYLPMLEKCWYPTSVPVLYPGLNASAAALSSFMNPDKISAPLLMPQRLPSPLPAHPSVDSSVLLQALKPIPPLNLETKD

SEQ ID NO: 104 - DNA, 1216 bp, Homo sapiens
ggcagctgcacggctcctggccccggagcatgcgcgagagccgccccggagcgccccggagccccccgccgtcccgcccgcggcgtcccgcgccccgccgccagcgcacccccggacgctatggcccacccctccggctggccccttctgtaggatggtagcacacaaccaggtggcagccgacaatgcagtctccacagcagcagagccccgacggcggccagaaccttcctcctcttcctcctcctcgcccgcggcccccgcgcgcccgcggccgtgccccgcggtcccggccccggcccccggcgacacgcacttccgcacattccgttcgcacgccgattaccggcgcatcacgcgcgccagcgcgctcctggacgcctgcggattctactgggggcccctgagcgtgcacggggcgcacgagcggctgcgcgccgagcccgtgggcaccttcctggtgcgcgacagccgccagcggaactgctttttcgcccttagcgtgaagatggcctcgggacccacgagcatccgcgtgcactttcaggccggccgctttcacctggatggcagccgcgagagcttcgactgcctcttcgagctgctggagcactacgtggcggcgccgcgccgcatgctgggggccccgctgcgccagcgccgcgtgcggccgctgcaggagctgtgccgccagcgcatcgtggccaccgtgggccgcgagaacctggctcgcatccccctcaaccccgtcctccgcgactacctgagctccttccccttccagatttgaccggcagcgcccgccgtgcacgcagcattaactgggatgccgtgttattttgttattacttgcctggaaccatgtgggtaccctccccggcctgggttggagggagcggatgggtgtaggggcgaggcgcctcccgccctcggctggagacgaggccgcagaccccttctcacctcttgagggggtcctccccctcctggtgctccctctgggtccccctggttgttgtagcagcttaactgtatctggagccaggacctgaactcgcacctcctacctcttcatgtttacatatacccagtatctttgcacaaaccaggggttgggggagggtctctggctttatttttctgctgtgcagaatcctattttatattttttaaagtcagtttaggtaataaactttattatgaaagtttttttttt

SEQ ID NO: 105 - protein, 211 aa, Homo sapiens
MVAHNQVAADNAVSTAAEPRRRPEPSSSSSSSPAAPARPRPCPAVPAPAPGDTHFRTFRSHADYRRITRASALLDACGFYWGPLSVHGAHERLRAEPVGTFLVRDSRQRNCFFALSVKMASGPTSIRVHFQAGRFHLDGSRESFDCLFELLEHYVAAPRRMLGAPLRQRRVRPLQELCRQRIVATVGRENLARIPLNPVLRDYLSSFPFQI

SEQ ID NO: 106 - DNA, 1724 bp, Homo sapiens
ccttcataccggcccttcccctcggctttgcctggacagctcctgcctcccgcagggcccacctgtgtcccccagcgccgctccacccagcaggcctgagcccctctctgctgccagacaccccctgctgcccactctcctgctgctcgggttctgaggcacagcttgtcacaccgaggcggattctctttctctttctcttctggcccacagccgcagcaatggcgctgagttcctctgctggagttcatcctgctagctgggttcccgagctgccggtctgagcctgaggcatggagcctcctggagactgggggcctcctccctggagatccacccccagaaccgacgtcttgaggctggtgctgtatctcaccttcctgggagccccctgctacgccccagctctgccgtcctgcaaggaggacgagtacccagtgggctccgagtgctgccccaagtgcagtccaggttatcgtgtgaaggaggcctgcggggagctgacgggcacagtgtgtgaaccctgccctccaggcacctacattgcccacctcaatggcctaagcaagtgtctgcagtgccaaatgtgtgacccagccatgggcctgcgcgcgagccggaactgctccaggacagagaacgccgtgtgtggctgcagcccaggccacttctgcatcgtccaggacggggaccactgcgccgcgtgccgcgcttacgccacctccagcccgggccagagggtgcagaagggaggcaccgagagtcaggacaccctgtgtcagaactgccccccggggaccttctctcccaatgggaccctggaggaatgtcagcaccagaccaagtgcagctggctggtgacgaaggccggagctgggaccagcagctcccactgggtatggtggtttctctcagggagcctcgtcatcgtcattgtttgctccacagttggcctaatcatatgtgtgaaaagaagaaagccaaggggtgatgtagtcaaggtgatcgtctccgtccagcggaaaagacaggaggcagaaggtgaggccacagtcattgaggccctgcaggcccctccggacgtcaccacggtggccgtggaggagacaataccctcattcacggggaggagcccaaaccactgacccacagactctgcaccccgacgccagagatacctggagcgacggctgctgaaagaggctgtccacctggcgaaaccaccggagcccggaggcttgggggctccgccctgggctggcttccgtctcctccagtggagggagaggtggggcccctgctggggtagagctggggacgccacgtgccattcccatgggccagtgagggcctggggcctctgttctgctgtggcctgagctccccagagtcctgaggaggagcgccagttgcccctcgctcacagaccacacacccagccctcctgggccagcccagagggcccttcagaccccagctgtctgcgcgtctgactcttgtggcctcagcaggacaggccccgggcactgcctcacagccaaggctggactgggttggctgcagtgtggtgtttagtggataccacatcggaagtgattttctaaattggatttgaattccggtcctgtcttctatttgtcatgaaacagtgtatttggggagatgctgtgggaggatgtaaatatcttgtttctcctcaaaaaaaaaaaaaaaaaaaaaaaaaa

SEQ ID NO: 107 - protein, 283 aa, Homo sapiens [sequence omitted]

SEQ ID NO: 108 - DNA, 3299 bp, Homo sapiens
ccacgcgtccgtgcttttccacagaaggttagaccctgaaagagatggctcagcaccacctatggatcttgctcctttgcctgcaaacctggccggaagcagctggaaaagactcagaaatcttcacagtgaatgggattctgggagagtcagtcactttccctgtaaatatccaagaaccacggcaagttaaaatcattgcttggacttctaaaacatctgttgcttatgtaacaccaggagactcagaaacagcacccgtagttactgtgacccacagaaattattatgaacggatacatgccttaggtccgaactacaatctggtcattagcgatctgaggatggaagacgcaggagactacaaagcagacataaatacacaggctgatccctacaccaccaccaagcgctacaacctgcaaatctatcgtcggcttgggaaaccaaaaattacacagagtttaatggcatctgtgaacagcacctgtaatgtcacactgacatgctctgtagagaaagaagaaaagaatgtgacatacaattggagtcccctgggagaagagggtaatgtccttcaaatcttccagactcctgaggaccaagagctgacttacacgtgtacagcccagaaccctgtcagcaacaattctgactccatctctgcccggcagctctgtgcagacatcgcaatgggcttccgtactcaccacaccgggttgctgagcgtgctggctatgttctttctgcttgttctcattctgtcttcagtgtttttgttccgtttgttcaagagaagacaagatgctgcctcaaagaaaaccatatacacatatatcatggcttcaaggaacacccagccagcagagtccagaatctatgatgaaatcctgcagtccaaggtgcttccctccaaggaagagccagtgaacacagtttattccgaagtgcagtttgctgataagatggggaaagccagcacacaggacagtaaacctcctgggacttcaagctatgaaattgtgatctaggctgctgggctgaattctccctctggaaactgagttacaaccaccaatactggcaggttccctggatccagatcttctctgcccaactcttactgggagattgcaaactgccacatctcagcctgtaagcaaagcaggaaaccttctgctgggcatagcttgtgcctaaatggacaaatggatgcatacccttcctgaaatgactcccttctgaatgaatgacaaagcaggttacctagtatagttttcccaaacttcttcccatcatagcacatgtagaaaataatatttttatggcacactgggataaacaagcaagattgctcacttctggaagctgcatatgactagaggcctcttgtgactggaggtaacaaccctgcccagtaactgtgggagaaggggatcaatattttgcacacctgtaataggccatggcacaccagccaagatgctctgctcacagtcagtatgtgtgaagatccctggtgcgtggccttcaccacgcatcttgagcaaattaggaaaatgtacccttcgcttgaggcagatgcagcccttcccccgagtgcatggcttggagagcagaatgtgggctgcatataagcacactcatccctttgtctgggaatctttgtgcagggcataacaggcttagtaagtccaaacacagatgacagtgctgtgtgggtctctgtcagagttgtggctctcagccatgtagacacactctccaaatggagtgttggaaaatgttctttctgcagggtctagagactgctgggacacttttcttggagtgctacttcagaagccttataggattttctttctggccaagatttccttctgtatcactccaagcagcctcagcagaagaagcagccatgcccagtattcccactctccaaaaggaactgaccagcttatatttctcacacttctggggaactgggtataatccaaccatcaaaatagaagaccttgcaagaagcagagtcattctccagaaggaacttgggagatgatggtgcagatgatgaaactgggttcatcccagttccaaagactcagagaactagagtttaagctgaggcagagtgccgccaccctggcatgccccacaaacagatcaccagccagcttacacaggcattaactctcctcaatgaggaagaatcattcacaactgagcaagacattcatatgatcatttaaggaagtgtttcccttatgtgttagcaagtataatcggctaactcctaaatcccaatgaatagtcctaggctggacagcaatgggctgcaattaggcagataaagacatcagtcccagtaaatgaatccatagactcatctagcaccaactaccattagcactatgttaggagctgcaaggccccaaagtagaagatgtgcataatgtctgctcttgtgtagctcaggagacaattccagcacagacactacagttaacgctgaactgcagctgcaagtaatagcatgaacagtcagaaaaataccttatgagggggcagggctgaagctgggccttgaaggatggatgaaatttggatagagaatgaggaagacagagggcctccaagtgagagaagcatgaaaaatgagcaggggcctggatcagtggggtgtattcagagcacctctccagatgcaccatgcatgctcacagtcccttgcctatgtgtggcagagtgtcccagccagatgtgtgcccccaccccatgtccatttacatgtccttcaatgcccacctcaaaaggtacctcttctgtaaagctttccctggtatcaggaatcaaaattaatcagggatcttttcacactgctgttttttcctctttggtccttctatcactaaaactcatctcattcagccttacagcataactaattatttgttttcctcactacattgtacatgtgggaattacagataaacggaagccggctggggtggtggctcacgcctgtaaccccaacactttgggaggccaaggcaggcggatcacctgaggtcaggagttcgagattagtctggccaacatggtgaaaccccatctctactaaaaatacgaaattagccaggtgtggtggcacacatctgtagtcccagctactctggaggctgagacaggagaatcgcttgaacccaggaagtggaggttgcagtgagctgagatcacaccactgcactccagcctgggagagagagagtgagtctccatctcaaaaaaaaaaaaaaaaa

SEQ ID NO: 109 - protein, 328 aa, Homo sapiens
MAQHHLWILLLCLQTWPEAAGKDSEIFTVNGILGESVTFPVNIQEPRQVKIIAWTSKTSVAYVTPGDSETAPVVTVTHRNYYERIHALGPNYNLVISDLRMEDAGDYKADINTQADPYTTTKRYNLQIYRRLGKPKITQSLMASVNSTCNVTLTCSVEKEEKNVTYNWSPLGEEGNVLQIFQTPEDQELTYTCTAQNPVSNNSDSISARQLCADIAMGFRTHHTGLLSVLAMFFLLVLILSSVFLFRLFKRRQDAASKKTIYTYIMASRNTQPAESRIYDEILQSKVLPSKEEPVNTVYSEVQFADKMGKASTQDSKPPGTSSYEIVI

SEQ ID NO: 110 - DNA, 6296 bp, Homo sapiens
cactgggagagtttatgtggccgaggcagacaagtggaattaggccttgctgcaggggacttcatttccttctcagtactggacccatttatgaggaggtggcttatgaaagtgtgatgttcgcgtatttcttgacaggcagtggcgtgatcttggctcactgcaacctccgactccctggttcaagcgattctcctgcctcagcctcctgagtggggattacaggccacagcaaacacaggtgtgcaggaaccgtttgtcatggaagccagggagcctgggaggcccacacccacctaccatcttgtccctaacaccagccagtcccaggtggaagaagatgtcagctcgccacctcaaaggtcctccgaaactatgcagctgaagaaggagatctccctgctgaatggggtcagcctggtggtgggcaacatgatcggctcagggatctttgtctcacccaagggtgtgctggtacacactgcctcctatgggatgtcactgattgtgtgggccattggtgggctcttctctgttgtgggtgccctttgttatgcagagctggggaccaccatcaccaagtcgggagccagctacgcttatattctagaggcctttgggggcttcattgccttcatccgcctgtgggtctcactgctagttgttgagcccaccggtcaggccatcatcgccatcacctttgccaactacatcatccagccgtccttccccagctgtgatcccccatacctggcctgccgtctcctggctgctgcttgcatatgtctgctgacatttgtgaactgtgcctatgtcaagtggggcacacgtgtgcaggacacgttcacttacgccaaggtcgtagcgctcattgccatcattgtcatgggccttgttaaactgtgccagggacactctgagcactttcaggacgcctttgagggttcctcctgggacatgggaaacctctctcttgccctctactctgccctcttctcttactcaggttgggacacccttaattttgtaacagaagaaatcaaaaacccagaaagaaatttgcccttggccattgggatttctatgccaattgtgacgctcatctacatcctgaccaatgtggcctattacacagtgctgaacatttcagatgtccttagcagtgatgctgtggctgtgacatttgctgaccagacgtttggcatgttcagctggaccatccccattgctgttgccctgtcctgctttgggggcctcaatgcatccatctttgcttcatcaaggttgttcttcgtgggctcccgggagggccacctaccggaccttctgtccatgatccacattgagcgttttacacctatccctgctttactgttcaattgcaccatggcactcatctacctcatcgtggaggatgttttccagcttatcaactacttcagcttcagctactggttcttcgtgggcctgtctgttgttggacagctctacctccgctggaaggagcccaagcggccccggcctctcaagctgagcgtgtttttccccatcgtgttctgcatatgctccgtgtttctggtgatagtgcccctcttcactgacaccattaattccctcattggcatcgggattgccctttctggagtccctttctacttcatgggtgtttacctgccagagtcccggaggccattgtttattcggaatgtcctggctgctatcaccagaggcacccagcagctttgcttttgtgtcctgactgagcttgatgtagccgaagaaaaaaaggatgagaggaaaactgactagaggtcagaggtggctttctgaggcctggaaggcaggccaaccagcaaaatcctgataacaagactctgtgggcccaactctcctgaattaaaggagccttttgacccaatcatatagtggggctcagggccagtgctcactcttattggtaagctataggagactcaggatctgggccaacctcaaggtgggggcttcagagggtggggggaagattggggaacggggggaatggtcatttagttttactcctgataggtagatgcagctcttacagatatttacttggtaaagtgcagtggggaagagggaatgctaggttgatagggctggtggcttctgaatttggtatttgaactaggagtccctatagaggggctgctttatgggaagtttttctctgaccaggtacaacacctgactttaaaggcctgaaatgctaccatttcttcctctggctcaaaattcttccctggggagagagttatattcccttatttattgatatttagtccagaacaccagttctaacgaagcatgcgtgtctcttcatctacaggatgcaataggctgattgtatttaaaaatcaaagtacccaaaactgagtccctttgggctcagaaatgtctgtggtattgggtcagactctgaccacagattttatgctgtttagcacaatttctattgagtcttacctgcaacaatgaaccttaaagatttttttactcacgtacctgttacactttagcatacagatagatcatagatcacgttacaagcacttggctcaggtccagcaaggacagatgaacaaattcctgagtcagaagtctgttaatattgctgttttgaaggacaatcctttattttacttgagaccttacatctttgttctagctgacagtaaatctctgggtttctgttacgaactctaagagggctgaaacttctgatattcaggtggatcacctgaattctctcagctgtcaatggcttggagaacatctcatgggcccaagtcatcaaataacctgttcctctctgtaagggcagtgtgagggactgctgtgcagacccaagcaatcccaacctggtgctaggtcatttcacttttctgaaaacctcacatcaggctgcatcctcttctgtccctggcaccaggctttgtttacacttggagccaccttggtgtgggtcaccgggacagtgtactcctctcctgccagcctccccttccccgaggtgtggtggctgcagtctcaggaagagcttggtacttgtggggacttctgttttctccctgtggagatcagtgaagactgggaggaaagctgcttcaacctgagtccggctcttcagcaggctgcacaagtggaagcaactaattctggtgctcaggctgggctctccacccaagttaggcctgctctggcctaatggatcttactgtatgagcaggacggctgcattggattgtacaactgttttgtgatgcccccagacactgtcatcctaggccgagaagaacctgctagcttgacataccccatgggcttatccttaggttttggaattggtcaacagtgaggcagtctcccttcctgaccattcttctccacccagtcacagataagggaataaccttggccatatatttgctcaataaagattgaaggaagcatggtcatagttgccctgggttcagagcataatgcatatgtgaagcatggggtgacattcctactgtcatgggtttgggatttgtaacggcaaattcctgcccgacgacagggtgtcttatgcaaaggctgacttgcctgaacgctaagaacatgacttctgtctgagctaagctggcacccatcccagggctcctctggagctaatcctttaagcaaaatgtgcttgccttttaaagatccctgaccccagctttagctttctccaccagataaccagctaatcccaggaatttgctgccccccaccagtggcttctagggaaagcaaggacctcacatgccaggtgccctagtacttgcttagtgagccatgtcatcctcctttcatttttggatggtgacagcatttttcccctctgtgctggatacagacttctcccaggatcctctctttgggagcgaagccagaggatccctacagcactcaagcttcatggtggaattaatttctgccagctctttgttgtctgtctccttaaatccttttcctggtgtgcttattatcccttttgcagtgagtacagtttattaagttgtcagccctttaatattggggaaacttaatgagtataaatagcagggagcacattgtaacagcacagtgttttgtttttttcacccggttgctgtatgagaatggctttcaatcctttgtttctatgcctacagacagaaagcaagatgtctaatattagacatacaagttgctgcctgttataacggtgaattatacctttgtgcatgcctaggatgtttgttgttttaattagctgcaatatatacggcctgtgtacacagaatttaatcacttcggcaggttgaacaactccatgtagataagagcaagtgtaggcaaaggtttagaaaatggacataaagtcaaagaatgatggcaggtaggatgaaggagagatacttaggaaatcctaaaagaggcggcaagaaggtacctccctgtgtaactcaccttcccccatgacagtaagagacactcacaggctatgagggtacacccctagctgaatgttctgtgttgtttccttagacctgtggtgtccgctgcaacagctactagccacgtgtagctaattacattaaaatgaaataaaattaaaagctcagtttctcagttgcgctaatcacatttcaagtgctcagcagccacccgtgtctactactacacagtgcagacacagaacatatcatcactgcagatagttctactggacaatgttacgctagaataaacaccaaggcagtcagttaaggcagctatggtttggaaaggcatacggacagagtctgcttagaagagatacaagttgttaataaaattgatcctgttgatagtagtttgtttttgtggtgggtgctgtgaagagtaaacattactcagtggaaagctaagttcagaaggtactttgtttttcctcccttgccttaagtccttggtatttataatcaatgctgaaccttctatttcactaccgctccctgttttagatattcagatttaaaaggttttcaaagaattactttcttccatgttcaaagctagattttactaaacacatgtatcacattcatatatattgtttcttggccccactgccaaaggaagtcagtcagtaatttcacaaccgttatcagagtttggaagcagaaatagctgttaactaaaatctcccactgctcagactactttctgccctaatggccattactatccagtctgtattgctacaagggacccactggtaccccttttagattctatcaaaaggaacagggttttcctagaggcaggcagcctggtggtatggcacagcagaagcttactgctaatgaaatgggaacctccccctcccttgtggtttcagcacagaacctgaatgccaggaaaaattcctgggccaagaagctaaagctaaagaaaccttccttttttcaacgtttttttttctttcaaactgtagggtcacttttgattgaggcaaaggggtcctactgtaagtggaaaagactcactcccctaacataagttttcactgtggtgggatggtgccgcccgatatgcttgatatgcttttccttccacatgttaagctaggaaacctaacaggatgtcagcagggcagttaactctggactcagagccctcaagggcatgtggcagaacctcatggacatcacaagaccatcagtctgaatccaggtcgtgggggctgtcatagccgaactccttctgcacatccagagggtacttgctccacatccgctgtctgctgctgcctctttcctcctcactcaggctgttgtagtcagcagagcctagaatgacatcccgggagtggattctaaatgtgattttcctaggctactgcaggagccccttctcttctcagaaaggtctgtttttgttcccgattgtaatgcaaaatccttgctcaataaataaaaaagaatatagaattcttttttttttaaagaaggaatcactttcctatcatctaaaccaagttccttcacactggagtattttgtcacttctcccctccgtggagtattttgtcacttctcccctccgtataggattttttgttgttgtaagagttgtagtcatattgtaaatatttttgtacctttctccttttaacgtgttattgacaaacctccccaaaagaatatgcaattgtttgattcatttctctgttatcagacaccaataaattctttttgttgggc

SEQ ID NO: 111 - protein, 515 aa, Homo sapiens
MEAREPGRPTPTYHLVPNTSQSQVEEDVSSPPQRSSETMQLKKEISLLNGVSLVVGNMIGSGIFVSPKGVLVHTASYGMSLIVWAIGGLFSVVGALCYAELGTTITKSGASYAYILEAFGGFIAFIRLWVSLLVVEPTGQAIIAITFANYIIQPSFPSCDPPYLACRLLAAACICLLTFVNCAYVKWGTRVQDTFTYAKVVALIAIIVMGLVKLCQGHSEHFQDAFEGSSWDMGNLSLALYSALFSYSGWDTLNFVTEEIKNPERNLPLAIGISMPIVTLIYILTNVAYYTVLNISDVLSSDAVAVTFADQTFGMFSWTIPIAVALSCFGGLNASIFASSRLFFVGSREGHLPDLLSMIHIERFTPIPALLFNCTMALIYLIVEDVFQLINYFSFSYWFFVGLSVVGQLYLRWKEPKRPRPLKLSVFFPIVFCICSVFLVIVPLFTDTINSLIGIGIALSGVPFYFMGVYLPESRRPLFIRNVLAAITRGTQQLCFCVLTELDVAEEKKDERKTD

SEQ ID NO: 112 - DNA, 885 bp, Homo sapiens
agcctacgcacgaaagtgactagggaggaaggatattataaagtgatgcaaacagaaattccaccagcctccatgtatcatcatgtgtcataactcagtcaagctcagtgagcattctcagcacattgcctcaacagcttcaaggtgagccagctcaagactttgctctccaccaggcagaagatgacagactgtgaatttggatatatttacaggctggctcaggactatctgcagtgcgtcctacagataccacaacctggatcaggtccaagcaaaacgtccagagtgctacaaaatgttgcgttctcagtccaaaaagaagtggaaaagaatctgaagtcatgcttggacaatgttaatgttgtgtccgtagacactgccagaacactattcaaccaagtgatggaaaaggagtttgaagacggcatcattaactggggaagaattgtaaccatatttgcatttgaaggtattctcatcaagaaacttctacgacagcaaattgccccggatgtggatacctataaggagatttcatattttgttgcggagttcataatgaataacacaggagaatggataaggcaaaacggaggctgggaaaatggctttgtaaagaagtttgaacctaaatctggctggatgacttttctagaagttacaggaaagatctgtgaaatgctatctctcctgaagcaatactgttgaccagaaaggacactccatattgtgaaaccggcctaatttttctgactgatatggaaacgattgccaacacatacttctacttttaaataaacaactttgatgatgtaacttgaccttccagagttatggaaattttgtccccatgtaatgaataaattgtatgtatttttctct

SEQ ID NO: 113 - protein, 175 aa, Homo sapiens
MTDCEFGYIYRLAQDYLQCVLQIPQPGSGPSKTSRVLQNVAFSVQKEVEKNLKSCLDNVNVVSVDTARTLFNQVMEKEFEDGIINWGRIVTIFAFEGILIKKLLRQQIAPDVDTYKEISYFVAEFIMNNTGEWIRQNGGWENGFVKKFEPKSGWMTFLEVTGKICEMLSLLKQYC

SEQ ID NO: 114 - DNA, 4154 bp, Homo sapiens
taacgaggaacttttcgccggcgccgggccgcctctgaggccagggcaggacacgaacgcgcggagcggcggcggcgactgagagccggggccgcggcggcgctccctaggaagggccgtacgaggcggcgggcccggcgggcctcccggaggaggcggctgcgccatggacgagccacccttcagcgaggcggctttggagcaggcgctgggcgagccgtgcgatctggacgcggcgctgctgaccgacatcgaagacatgcttcagcttatcaacaaccaagacagtgacttccctggcctatttgacccaccctatgctgggagtggggcagggggcacagaccctgccagccccgataccagctccccaggcagcttgtctccacctcctgccacattgagctcctctcttgaagccttcctgagcgggccgcaggcagcgccctcacccctgtcccctccccagcctgcacccactccattgaagatgtacccgtccatgcccgctttctcccctgggcctggtatcaaggaagagtcagtgccactgagcatcctgcagacccccaccccacagcccctgccaggggccctcctgccacagagcttcccagccccagccccaccgcagttcagctccacccctgtgttaggctaccccagccctccgggaggcttctctacaggaagccctcccgggaacacccagcagccgctgcctggcctgccactggcttccccgccaggggtcccgcccgtctccttgcacacccaggtccagagtgtggtcccccagcagctactgacagtcacagctgcccccacggcagcccctgtaacgaccactgtgacctcgcagatccagcaggtcccggtcctgctgcagccccacttcatcaaggcagactcgctgcttctgacagccatgaagacagacggagccactgtgaaggcggcaggtctcagtcccctggtctctggcaccactgtgcagacagggcctttgccgaccctggtgagtggcggaaccatcttggcaacagtcccactggtcgtagatgcggagaagctgcctatcaaccggctcgcagctggcagcaaggccccggcctctgcccagagccgtggagagaagcgcacagcccacaacgccattgagaagcgctaccgctcctccatcaatgacaaaatcattgagctcaaggatctggtggtgggcactgaggcaaagctgaataaatctgctgtcttgcgcaaggccatcgactacattcgctttctgcaacacagcaaccagaaactcaagcaggagaacctaagtctgcgcactgctgtccacaaaagcaaatctctgaaggatctggtgtcggcctgtggcagtggagggaacacagacgtgctcatggagggcgtgaagactgaggtggaggacacactgaccccacccccctcggatgctggctcacctttccagagcagccccttgtcccttggcagcaggggcagtggcagcggtggcagtggcagtgactcggagcctgacagcccagtctttgaggacagcaaggcaaagccagagcagcggccgtctctgcacagccggggcatgctggaccgctcccgcctggccctgtgcacgctcgtcttcctctgcctgtcctgcaaccccttggcctccttgctgggggcccgggggcttcccagcccctcagataccaccagcgtctaccatagccctgggcgcaacgtgctgggcaccgagagcagagatggccctggctgggcccagtggctgctgcccccagtggtctggctgctcaatgggctgttggtgctcgtctccttggtgcttctctttgtctacggtgagccagtcacacggccccactcaggccccgccgtgtacttctggaggcatcgcaagcaggctgacctggacctggcccggggagactttgcccaggctgcccagcagctgtggctggccctgcgggcactgggccggcccctgcccacctcccacctggacctggcttgtagcctcctctggaacctcatccgtcacctgctgcagcgtctctgggtgggccgctggctggcaggccgggcagggggcctgcagcaggactgtgctctgcgagtggatgctagcgccagcgcccgagacgcagccctggtctaccataagctgcaccagctgcacaccatggggaagcacacaggcgggcacctcactgccaccaacctggcgctgagtgccctgaacctggcagagtgtgcaggggatgccgtgtctgtggcgacgctggccgagatctatgtggcggctgcattgagagtgaagaccagtctcccacgggccttgcattttctgacacgcttcttcctgagcagtgcccgccaggcctgcctggcacagagtggctcagtgcctcctgccatgcagtggctctgccaccccgtgggccaccgtttcttcgtggatggggactggtccgtgctcagtaccccatgggagagcctgtacagcttggccgggaacccagtggaccccctggcccaggtgactcagctattccgggaacatctcttagagcgagcactgaactgtgtgacccagcccaaccccagccctgggtcagctgatggggacaaggaattctcggatgccctcgggtacctgcagctgctgaacagctgttctgatgctgcgggggctcctgcctacagcttctccatcagttccagcatggccaccaccaccggcgtagacccggtggccaagtggtgggcctctctgacagctgtggtgatccactggctgcggcgggatgaggaggcggctgagcggctgtgcccgctggtggagcacctgccccgggtgctgcaggagtctgagagacccctgcccagggcagctctgcactccttcaaggctgcccgggccctgctgggctgtgccaaggcagagtctggtccagccagcctgaccatctgtgagaaggccagtgggtacctgcaggacagcctggctaccacaccagccagcagctccattgacaaggccgtgcagctgttcctgtgtgacctgcttcttgtggtgcgcaccagcctgtggcggcagcagcagcccccggccccggccccagcagcccagggcgccagcagcaggccccaggcttccgcccttgagctgcgtggcttccaacgggacctgagcagcctgaggcggctggcacagagcttccggcccgccatgcggagggtgttcctacatgaggccacggcccggctgatggcgggggccagccccacacggacacaccagctcctcgaccgcagtctgaggcggcgggcaggccccggtggcaaaggaggcgcggtggcggagctggagccgcggcccacgcggcgggagcacgcggaggccttgctgctggcctcctgctacctgccccccggcttcctgtcggcgcccgggcagcgcgtgggcatgctggctgaggcggcgcgcacactcgagaagcttggcgatcgccggctgctgcacgactgtcagcagatgctcatgcgcctgggcggtgggaccactgtcacttccagctagaccccgtgtccccggcctcagcacccctgtctctagccactttggtcccgtgcagcttctgtcctgcgtcgaagctttgaaggccgaaggcagtgcaagagactctggcctccacagttcgacctgcggctgctgtgtgccttcgcggtggaaggcccgaggggcgcgatcttgaccctaagaccggcggccatgatggtgctgacctctggtggccgatcggggcactgcaggggccgagccattttggggggcccccctccttgctctgcaggcaccttagtggcttttttcctcctgtgtacagggaagagaggggtacatttccctgtgctgacggaagccaacttggctttcccggactgcaagcagggctctgccccagaggcctctctctccgtcgtgggagagagacgtgtacatagtgtaggtcagcgtgcttagcctcctgacctgaggctcctgtgctactttgccttttgcaaactttattttcatagattgagaagttttgtacagagaattaaaaatgaaattatttata

SEQ ID NO: 115 - protein, 1147 aa, Homo sapiens [sequence omitted]

SEQ ID NO: 116 - DNA, 2304 bp, Homo sapiens
cacagctctgcagctcgtggcagcggcgcagcgctccagccatgtcgcgcggcctccagcttctgctcctgagctgcgcctacagcctggctcccgcgacgccggaggtgaaggtggcttgctccgaagatgtggacttgccctgcaccgccccctgggatccgcaggttccctacacggtctcctgggtcaagttattggagggtggtgaagagaggatggagacaccccaggaagaccacctcaggggacagcactatcatcagaaggggcaaaatggttctttcgacgcccccaatgaaaggccctattccctgaagatccgaaacactaccagctgcaactcggggacatacaggtgcactctgcaggacccggatgggcagagaaacctaagtggcaaggtgatcttgagagtgacaggatgccctgcacagcgtaaagaagagacttttaagaaatacagagcggagattgtcctgctgctggctctggttattttctacttaacactcatcattttcacttgtaagtttgcacggctacagagtatcttcccagatttttctaaagctggcatggaacgagcttttctcccagttacctccccaaataagcatttagggctagtgactcctcacaagacagaactggtatgagcaggatttctgcaggttcttcttcctgaagctgaggctcaggggtgtgcctgtctgttacactggaggagagaagaatgagcctacgctgaagatggcatcctgtgaagtccttcacctcactgaaaacatctggaaggggatcccaccccattttctgtgggcaggcctcgaaaaccatcacatgaccacatagcatgaggccactgctgcttctccatggccaccttttcagcgatgtatgcagctatctggtcaacctcctggacattttttcagtcatataaaagctatggtgagatgcagctggaaaagggtcttgggaaatatgaatgcccccagctggcccgtgacagactcctgaggacagctgtcctcttctgcatcttggggacatctctttgaattttctgtgttttgctgtaccagcccagatgttttacgtctgggagaaattgacagatcaagctgtgagacagtgggaaatatttagcaaataatttcctggtgtgaaggtcctgctattactaaggagtaatctgtgtacaaagaaataacaagtcgatgaactattccccagcagggtcttttcatctgggaaagacatccataaagaagcaataaagaagagtgccacatttatttttatatctatatgtacttgtcaaagaaggtttgtgtttttctgcttttgaaatctgtatctgtagtgagatagcattgtgaactgacaggcagcctggacatagagagggagaagaagtcagagagggtgacaagatagagagctatttaatggccggctggaaatgctgggctgacggtgcagtctgggtgctcgcccacttgtcccactatctgggtgcatgatcttgagcaagttccttctggtgtctgctttctccattgtaaaccacaaggctgttgcatgggctaatgaagatcatatacgtgaaaattatttgaaaacatataaagcactatacagattcgaaactccattgagtcattatccttgctatgatgatggtgttttggggatgagagggtgctatccatttctcatgttttccattgtttgaaacaaagaaggttaccaagaagcctttcctgtagccttctgtaggaattcttttggggaagtgaggaagccaggtccacggtctgttcttgaagcagtagcctaacacactccaagatatggacacacgggagccgctggcagaagggacttcacgaagtgttgcatggatgttttagccattgttggctttcccttatcaaacttgggcccttcccttcttggtttccaaaggcatttattgctgagttatatgttcactgtccccctaatattagggagtaaaacggataccaagttgatttagtgtttttacctctgtcttggctttcatgttattaaacgtatgcatgtgaagaagggtgtttttctgttttatattcaactcataagactttgggataggaaaaatgagtaatggttactaggcttaatacctgggtgattacataatctgtacaacgaacccccatgatgtaagtttacctatgtaacaaacctgcacttatacccatgaacttaaaatgaaagttaaaaataaaaaacatatacaaataaaaaaaa

SEQ ID NO: 117 - protein, 205 aa, Homo sapiens
MSRGLQLLLLSCAYSLAPATPEVKVACSEDVDLPCTAPWDPQVPYTVSWVKLLEGGEERMETPQEDHLRGQHYHQKGQNGSFDAPNERPYSLKIRNTTSCNSGTYRCTLQDPDGQRNLSGKVILRVTGCPAQRKEETFKKYRAEIVLLLALVIFYLTLIIFTCKFARLQSIFPDFSKAGMERAFLPVTSPNKHLGLVTPHKTELV

SEQ ID NO: 118 - DNA, 1216 bp, Homo sapiens
atgctcctcgatgtggagccgctggagcctacacttagcaacatcatcgagcagcgcagcctgaagtggatcttcgtcgggggcaagggtggtgtgggcaagaccacctgcagctgcagcctggcagtccagctctccaaggggcgtgagagtgttctgatcatctccacagacccagcacacaacatctcagatgcttttgaccagaagttctcaaaggtgcctaccaaggtcaaaggctatgacaacctctttgctatggagattgaccccagcctgggcgtggcggacgtgcctgacgagttcttcgaggaggacaacatgctgagcatgggcaagaagatgatgcaggaggccatgagcgcatttcccggcatcgatgaggccatgagctatgccgaggtcatgaggctggtgaagggcatgaacttctcggtggtggtatttgacacggcacccacgggccacaccctgaggctgctcaacttccccaccatcgtggagcggggcctgggccggcttatgcagatcaagaaccagatcagccctttcatctcacagatgtgcaacatgctgggcctgggggacatgaacgcagaccagctggcctccaagctggaggagacgctgcccgtcatccgctcagtcagcgaacagttcaaggaccctgagcagacaactttcatctgcgtatgcattgctgagttcctgtccctgtatgagacagagaggctgatccaggagctggccaagtgcaagattgacacacacaatataattgtcaaccagctcgtcttccccgaccccgagaagccctgcaagatgtgtgaggcccgtcacaagatccaggccaagtatctggaccagatggaggacctgtatgaagacttccacatcgtgaagctgccgctgttaccccatgaggtgcggggggcagacaaggtcaacaccttctcggccctcctcctggagccctacaagccccccagtgcccagtagcacagctgccagccccaaccgctgccatttcacactcaccctccaccctccccaccccctcggggcagagtttgcacaaagtcccccccataatacagggggagccacttgggcaggaggcagggaggggtccattccccctggtggggctggtggggagctgtagttgccccctacctctcccacctcttgctcttcaataaatgatcttaaactg

SEQ ID NO: 119 - protein, 332 aa, Homo sapiens
MLLDVEPLEPTLSNIIEQRSLKWIFVGGKGGVGKTTCSCSLAVQLSKGRESVLIISTDPAHNISDAFDQKFSKVPTKVKGYDNLFAMEIDPSLGVADVPDEFFEEDNMLSMGKKMMQEAMSAFPGIDEAMSYAEVMRLVKGMNFSVVVFDTAPTGHTLRLLNFPTIVERGLGRLMQIKNQISPFISQMCNMLGLGDMNADQLASKLEETLPVIRSVSEQFKDPEQTTFICVCIAEFLSLYETERLIQELAKCKIDTHNIIVNQLVFPDPEKPCKMCEARHKIQAKYLDQMEDLYEDFHIVKLPLLPHEVRGADKVNTFSALLLEPYKPPSAQ

SEQ ID NO: 120 - DNA, 2646 bp, Homo sapiens
agtgcagacgcggctcctagcggatgggtgctattgtgaggcggttgtagaagagtttcgtgagtgctcgcagctcatacctgtggctgtgtatccgtggccacagctggttggcgtcgccttgaaatcccaggccgtgaggagttagcgagccctgctcacactcggcgctctggttttcggtgggtgtgccctgcacctgcctcttcccccattctcattaataaaggtatccatggagaacactgaaaactcagtggattcaaaatccattaaaaatttggaaccaaagatcatacatggaagcgaatcaatggactctggaatatccctggacaacagttataaaatggattatcctgagatgggtttatgtataataattaataataagaattttcataaaagcactggaatgacatctcggtctggtacagatgtcgatgcagcaaacctcagggaaacattcagaaacttgaaatatgaagtcaggaataaaaatgatcttacacgtgaagaaattgtggaattgatgcgtgatgtttctaaagaagatcacagcaaaaggagcagttttgtttgtgtgcttctgagccatggtgaagaaggaataatttttggaacaaatggacctgttgacctgaaaaaaataacaaactttttcagaggggatcgttgtagaagtctaactggaaaacccaaacttttcattattcaggcctgccgtggtacagaactggactgtggcattgagacagacagtggtgttgatgatgacatggcgtgtcataaaataccagtggaggccgacttcttgtatgcatactccacagcacctggttattattcttggcgaaattcaaaggatggctcctggttcatccagtcgctttgtgccatgctgaaacagtatgccgacaagcttgaatttatgcacattcttacccgggttaaccgaaaggtggcaacagaatttgagtccttttcctttgacgctacttttcatgcaaagaaacagattccatgtattgtttccatgctcacaaaagaactctatttttatcactaaagaaatggttggttggtggttttttttagtttgtatgccaagtgagaagatggtatatttggtactgtatttccctctcattttgacctactctcatgctgcagagggtactttaagacatactccttccatcaaatagaaccactatgaagctacctcaaacttccagtcaggtagttgcaattgaattaaattaggaataaataaaaatggatactggtgcagtcattatgagaggcaatgattgttaatttacagctttcatgattagcaagttacagtgatgctgtgctatgaattttcaagtaattgtgaaaaagttaaacattgaagtaatgaatttttatgatattccccccacttaagactgtgtattctagttttgtcaaactgtagaaatgatgatgtggaagaacttaggcatctgtgggcatggtcaaaggctcaaacctttattttagaattgatatacacggatgacttaactgcattttagaccatttatctgggattatggttttgtgatgtttgtcctgaacacttttgttgtaaaaaaataataataataatgtttaatattgagaaagaaactaatattttatgtgagagaaagtgtgagcaaactaacttgacttttaaggctaaaacttaacattcatagaggggtggagttttaactgtaaggtgctacaatgcccctggatctaccagcataaatatcttctgatttgtccctatgcatatcagttgagcttcatataccagcaatatatctgaagagctattatataaaaaccccaaactgttgattattagccaggtaatgtgaataaattctataggaacatatgaaaatacaacttaaataataaacagtggaatataaggaaagcaataaatgaatgggctgagctgcctgtaacttgagagtagatggtttgagcctgagcagagacatgactcagcctgttccatgaaggcagagccatggaccacgcaggaagggcctacagcccatttctccatacgcactggtatgtgtggatgatgctgccagggcgccatcgccaagtaagaaagtgaagcaaatcagaaacttgtgaagtggaaatgttctaaaggtggtgaggcaataaaaatcatagtactctttgtagcaaaattcttaagtatgttattttctgttgaagtttacaatcaaaggaaaatagtaatgttttatactgtttactgaaagaaaaagacctatgagcacataggactctagacggcatccagccggaggccagagctgagcactcagcccgggaggcaggctccaggcctcagcaggtgcggagccgtcactgcaccaagtctcactggctgtcagtatgacatttcacgggagatttcttgttgctcaaaaaatgagctcgcatttgtcaatgacagtttcttttttcttactagacctgtaacttttgtaaatacacacagcatgtaatggtatcttaaagtgtgtttctatgtgacaattttgtacaaatttgttattttccatttttatttcaaaatatacattcaaacttaaaatt

SEQ ID NO: 121 - protein, 277 aa, Homo sapiens
MENTENSVDSKSIKNLEPKIIHGSESMDSGISLDNSYKMDYPEMGLCIIINNKNFHKSTGMTSRSGTDVDAANLRETFRNLKYEVRNKNDLTREEIVELMRDVSKEDHSKRSSFVCVLLSHGEEGIIFGTNGPVDLKKITNFFRGDRCRSLTGKPKLFIIQACRGTELDCGIETDSGVDDDMACHKIPVEADFLYAYSTAPGYYSWRNSKDGSWFIQSLCAMLKQYADKLEFMHILTRVNRKVATEFESFSFDATFHAKKQIPCIVSMLTKELYFYH

SEQ ID NO: 122 - DNA, 5493 bp, Homo sapiens
gggccagtcggcgccgcgcggagctggccgctggattggctgcaacactcgcgtgtcaggcggttgctaggctccggccgcgcgccccgcccttgcgctcagcgccctctcaccgcccggtacgtgctcgcgcgaaggctgcggcgcggcgctcgcgcctcttaggcttggcggtggcggcggcggcagcttcgcgccgaatccccggggagcggcggtggcggcgtcctggggccaggaggagcgaacacctgccgcggtcctcccgccggcgctgggctctgtgtgctccgggatggagcaggtgtgcagagggtgagaacccagctctgggaccaagtcacttgcttccttacttagcaagactatcgacttgagcaaacttggacctgggatgaggatgtctgtgggcctctcgctgctgctgcccctctgggggaggacctttctcctcctgctctctgtggttatggctcagtcccactggcccagtgaaccctcagaggctgtcagggactgggaaaaccagcttgaggcatccatgcactcagtgctctcagacctccacgaggctgttcccacagtggttggcattcctgatggcacggctgtcgtcgggcgctcatttcgagtgaccattccaacagatttgattgcctccagtggagatatcatcaaggtatcagcggcagggaaggaggctttgccatcttggctgcactgggactcacagagccacaccctggagggcctcccccttgacactgataagggtgtgcattacatttcagtgagcgctacacggctgggggccaacgggagccacatcccccagacctccagtgtgttctccatcgaggtctaccctgaagaccacagtgatctgcagtcggtgaggacagcctccccagaccctggtgaggtggtatcatctgcctgtgctgcggatgaacctgtgactgttttgacggtgattttggatgccgacctcaccaagatgaccccaaagcaaaggattgacctcctgcacaggatgcggagcttctcagaagtagagcttcacaacatgaaattagtgccggtggtgaataacagactatttgacatgtcggccttcatggctggcccgggaaatccaaaaaaggtggtggagaatggggcccttctctcctggaagctgggctgctccctgaaccagaacagtgtgcctgacattcatggtgtagaggcccctgccagggagggcgcaatgtctgctcagcttggctaccctgtggtgggttggcacatcgccaataagaagccccctcttcccaaacgcgtccggaggcagatccatgctacacccacacctgtcactgccattgggcccccaaccacggctatccaggagcccccatccaggatcgtgccaacccccacatctccagccattgctcctccaacagagaccatggctcctccagtcagggatcctgttcctgggaaacccacggtcaccatccggactcgaggcgccattattcaaaccccaaccctaggccccatccagcctactcgggtgtcagaagctggcaccacagttcctggccagattcgcccaacgatgaccattcctggctatgtggagcctactgcagttgctacccctcccacaaccaccaccaagaagccacgagtatccacaccaaaaccagcaacgccttcaactgactccaccaccaccacgactcgcaggccaaccaagaaaccacggacaccccggccagtgccccgggtcaccaccaaagtttccatcaccagattggaaactgcctcaccgcctactcgtattcgcaccaccaccagtggagtgccccgtggcggagaacccaaccagcgcccagagctcaagaaccatattgacagggtagatgcctgggttggcacctactttgaggtgaagatcccgtcagacactttctatgaccatgaggacaccaccactgacaagctgaagctgaccctgaaactgcgggagcagcagctggtgggcgagaagtcctgggtacagttcaacagcaacagccagctcatgtatggccttcccgacagcagccacgtgggcaaacacgagtatttcatgcatgccacagacaaggggggcctgtcggctgtggatgccttcgagatccacgtccacaggcgcccccaaggggatagggctcctgcaaggttcaaggccaagtttgtgggtgacccggcactggtgttgaatgacatccacaagaagattgccttggtaaagaaactggccttcgcctttggagaccgaaactgtagcaccatcaccctgcagaatatcacccggggctccatcgtggtggaatggaccaacaacacactgcccttggagccctgccccaaggagcagatcgctgggctgagccgccggatcgctgaggatgatggaaaacctcggcctgccttctccaacgccctagagcctgactttaaggccacaagcatcactgtgacgggctctggcagttgtcggcacctacagtttatccctgtggtaccacccaggagagtgccctcagaggcgccgcccacagaagtgcctgacagggaccctgagaagagcagtgaggatgatgtctacctgcacacagtcattccggccgtggtggtcgcagccatcctgctcattgctggcatcattgccatgatctgctaccgcaagaagcggaagggcaagcttacccttgaggaccaggccaccttcatcaagaagggggtgcctatcatctttgcagacgaactggacgactccaagcccccaccctcctccagcatgccactcattctgcaggaggagaaggctcccctaccccctcctgagtaccccaaccagagtgtgcccgagaccactcctctgaaccaggacaccatgggagagtacacgcccctgcgggatgaggatcccaatgcgcctccctaccagcccccaccgcccttcacagtacccatggagggcaagggctcccgtcccaagaacatgaccccataccggtcacctcctccctatgtcccaccttaacccgcaagcgcctgggtggaggcagggtagggcagggccctggagacgacatggtgttgtctgtggagaccggtggcctgcagaccattgcccaccgggagccgacacctgacctagcacacactgacacaggggcctggacaagcccgccctctctggtcctcccaaaccccaaagcagctggagagactttggggacttttttatttttattttttgcctaacagcttttggtttgttcatagagaactcttcgcttcatttttgatggctggctctgaaagcaccatgtggagtggaggtggagggaccgaggaaccatgaatgaactcgcaggcagtgccgggcggccccctggctctctgcgttttgcctttaacactaactgtactgttttttctattcacgtgtgtctagctgcaggatgtaacatggaaaacagtaactaaagattaaattcaaaggactttcagaagttaaggttaagtttttacgtttaatctgctgtttacctaaacttgtatgtataatttttgggtgggtatggggaattgctttgctaaaaataagctcccagggtgtttcaaacttagagaagaccaagggacagtattttttatcaaaggaatactattttttcacactacgtcaacttggttgctctgataccccagagcctgattgggggcctcccggccctggctcacgccaagtccctggtgctgggtttgctctcccgctgttgccaggggctggaagctggaggggtctcttgggccatggacatccccacttccagcccatgtacactagtggcccacgaccaaggggtcttcatttccatgaaaaagggactccaagaggcagtggtggctgtggcccccaactttggtgctccagggtgggccaactgcttgtgggggcacctgggaggtcaaaggtctccaccacatcaacctattttgttttaccctttttctgtgcattgtttttttttttcctcctaaaaggaatatcacggttttttgaaacactcagtgggggacattttggtgaagatgcaatatttttatgtcatgtgatgctctttcctcacttgaccttggccgctttgtcctaacagtccacagtcctgccccgacccaccccatcccttttctctggcactccagtccagcttgggcctgaactactggaaaaggtctggcggctggggaggagtgccagcaatagttcataataaaaatctgttagctctcaaagctaattttttactaaagtttttatacagcctcaaattgttttattaaaaaaaagatttaaaatggtgatgcttacagcagtttgtacgagctcttaagtgttgattccatggaactgacggctttgcttgttttgattcttttccccctacttttcctaatggtttaaattctggaattacactggggttcttttgccttttttagcagaacatccgtccgtccatctgcatctctgtcccatgactcaggggcgcccactctgcttcgattctcctcctgtggaagaaaccattttgagcatgacttttcttgatgtctgaagcgttattttgggtactttttagggaggaatgcctttcgcaataatgtatccattcccctgattgagggtgggtgggtggacccaggctccctttgcacacagagcagctacttctaagccatatcgactgttttgcagaggatttgtgtgtcctccctcaggaggggaggcctggtaggagggggggagagttctctgtcctactgctctcaagagggcatttccccttgcgccttctcccacagggcccagcccctctcccctgcccaagtccccagggggtactctggagtgagcagtccccctgtgggggagcctgtaaatgcgggctcagtggaccactggtgactgggctcatgcctccaagtcagagtttcccctggtgccccagagacaggagcacaagtgggatctgacctggtgagattatttctgatgacctcatcaaaaaataaacaattcccaatgttccaggtgagggctttgaaaggccttccaaacagctccgtcgcccctagcaactccaccattgggcactgccatgcagagacgtggctggcccagaatggcctgttgccatagcaactggaggcgatggggcagtgaacagaataacaacagcaacaatgcctttgcaggcagcctgctcccctgagcgctgggctggtgatggccgttggactctgtgagatggagagccaatctcacattcaagtgttcaccaaccactgatgtgtttttatttccttctatatgattttaagatgtgttttctgcattctgtaaagaaacatatcaaactaaataaaagcagtgtctttatt

SEQ ID NO: 123 - protein, 895 aa, Homo sapiens
MRMSVGLSLLLPLWGRTFLLLLSVVMAQSHWPSEPSEAVRDWENQLEASMHSVLSDLHEAVPTVVGIPDGTAVVGRSFRVTIPTDLIASSGDIIKVSAAGKEALPSWLHWDSQSHTLEGLPLDTDKGVHYISVSATRLGANGSHIPQTSSVFSIEVYPEDHSDLQSVRTASPDPGEVVSSACAADEPVTVLTVILDADLTKMTPKQRIDLLHRMRSFSEVELHNMKLVPVVNNRLFDMSAFMAGPGNPKKVVENGALLSWKLGCSLNQNSVPDIHGVEAPAREGAMSAQLGYPVVGWHIANKKPPLPKRVRRQIHATPTPVTAIGPPTTAIQEPPSRIVPTPTSPAIAPPTETMAPPVRDPVPGKPTVTIRTRGAIIQTPTLGPIQPTRVSEAGTTVPGQIRPTMTIPGYVEPTAVATPPTTTTKKPRVSTPKPATPSTDSTTTTTRRPTKKPRTPRPVPRVTTKVSITRLETASPPTRIRTTTSGVPRGGEPNQRPELKNHIDRVDAWVGTYFEVKIPSDTFYDHEDTTTDKLKLTLKLREQQLVGEKSWVQFNSNSQLMYGLPDSSHVGKHEYFMHATDKGGLSAVDAFEIHVHRRPQGDRAPARFKAKFVGDPALVLNDIHKKIALVKKLAFAFGDRNCSTITLQNITRGSIVVEWTNNTLPLEPCPKEQIAGLSRRIAEDDGKPRPAFSNALEPDFKATSITVTGSGSCRHLQFIPVVPPRRVPSEAPPTEVPDRDPEKSSEDDVYLHTVIPAVVVAAILLIAGIIAMICYRKKRKGKLTLEDQATFIKKGVPIIFADELDDSKPPPSSSMPLILQEEKAPLPPPEYPNQSVPETTPLNQDTMGEYTPLRDEDPNAPPYQPPPPFTVPMEGKGSRPKNMTPYRSPPPYVPP

SEQ ID NO: 124 - DNA, 4289 bp, Homo sapiens
gatcaatactgaggccgcgtcgacccccttgagccgagacccccccccagcccagcccccaccccaccccccgcacacgccccaccccccccacgacccagcctcataccgcaccagctgaggcacccaagaggattaccccctggggccctctcccgccccccaaaaaagagaagatcccctctcctggcccatcccttcccttcttccctcccccctccccccgaactttccctctcgcatgcttttcccctgcaccacggatcgcctctcggatgccgcttgcctggaagctgcgttaggagcgagcggcggcggtggcggcggtggcggcggcggcggcagctcgggagtgctatgaccggcaaactcgccgagaagctgccggtgaccatgagcagtttgctaaaccaactgcctgacaatctgtaccccgaggagatccccagcgcgctcaacctcttctccggcagcagcgactcggtagtccattacaatcagatggctacagagaatgtaatggacatcggtctgaccaacgagaagcccaacccggaactctcttactccggctccttccagccagcccccgggaacaagaccgtgacctacttgggaaagttcgccttcgactccccttccaactggtgccaggacaacatcattagcctcatgagcgccggcatcttgggggtgcccccggcttcaggggcgctaagcacgcagacgtccacggccagcatggtgcagccaccgcagggtgacgtggaggccatgtatcccgcgctacccccctactccaactgcggcgacctctactcagagcccgtgtctttccacgacccccagggcaatcccgggctcgcctattccccccaggattaccaatcggccaagccggcgttggacagcaatctcttccccatgattcctgactacaacctctaccaccaccccaacgacatgggctccattccggagcacaagcccttccagggcatggaccccatccgggtcaacccgccccctactacccctctggagaccatcaaggcattcaaagacaagcagatccacccgggctttggcagcctgccccagccgccgctcaccctcaagcccatccggccccgcaagtaccccaaccggcctagcaagacaccgctccacgaacggccccacgcgtgcccggccgagggctgcgaccgccgtttcagccgttcggacgagctgacccggcacctgcgcatccacacgggccacaagcccttccagtgccggatctgcatgcggagcttcagccgcagcgaccacctcaccactcacatccgcactcatacgggcgagaagccctttgcctgcgagttctgcgggcgcaagtttgcgcgcagcgacgagcgcaagcgccacgccaagatccacctcaagcaaaaggagaagaaggcggagaagggcggtgcaccctctgcatcctcggcgccccccgtgtcgctggcccccgtggtcaccacctgcgcctgaggatcgggcccccagatccccacttttcccctccagtgcctcccggctgctagcctgaaagcagcgggaaagccagccacggaggcgtaggggccgcgccctggcctctccatggacgtgcggccccttgcttccccttcgatgcccccggttcccaacctttcacgccggccagcggtcaggggccagggctggaggcgccttcccctcgcggtcccccacttagccaaggcgtgggggcggaaaggtggcgtctagcccgctttgttcagttcggatcgccttgatccaggggccgccgggccgcgccaaggacctgcaagggactgaaggcggagcccatccaaccctcgcccgacccaaacacctcattgtttcccccacgtctccctctataccccctcgaagactcgagagggggagggggtaaggagcgcaccaaagcgcagagcttgctgcccgccgcacgcacgcgcgcctgcgtgcggggatgcgcgcgagtgtgtgcgtgctcgcgtgtgtgtgtatgtgtgtgtgtgagtgtgtgtgtgtgcgcgcgcgcaagcgtgtgtgtttaagactcttgagctgaactgggctgtgtttaccccaaactcttccccacctcgggtccccaagccgctgggagatgtcccatgctgggggtccgcacgtggctggaggaggtggtcttccatccgctctgaaatcatgtttcttagagaaatgcctcggatgccgccgacgcggtgctgctgccgccgcttcgggtttggcccctcagaacccctccttttctgagcgcttccctcttaggcctcagggcagtttgatctgtggggagaaagagcagccatcgctgagcctgccttttaaaatatatgtgtatttccttagccccactctaagaaatctatgttcctgagtttgccccctgccctcccactccttccccttttcccctctaaaccttctcccatctctttcaaaatcttttcccagaaaggcaggcttcaaccagccactccagctttgtgtcttctctcaattacatagcaatttctccttcccaccatcatggggaagctggctctgcttttgccctttgtcatcaccaacacaacagatagaatttaaatataagtatatggtgtgcgtgtgtatgtatgtgtatgtatatgcatgcatgtgtataaagatgcacatgcgtacatatacataacatacacacaatatgtattcctagcaaaataaaatctctaaggtacttggttatccagtgcagtgcaccggaataaagagaatttgtaggcgtatacagctttaaatgatttattttttatgaaaatgttaactgatgagattatatctacatacgtgtgttatgtgtgtggatatagatgcacacatatctgtacatatacatgtgagtgtacatatatacacatatacacatctatgtatggatatgtgtgtatacacatatacacatctctgtccaaaatttcctcaaagatatggggattttttcatgaatccatgtggatgaatgaggtgtctcctttccatacccagtctcaccttctccccaccctacctcacctcttctcaggcacccctcttccccagctgtcctgccagcccttctcgtacagggtggctcctttgaagtggagtaatagggaaggttgctctctgccacagcttgcagcatggtcttgactgaatgtactgttcctgttagcgttacttctcctgtggtcagtaagttgcccagagagaaggaacaaaggtctggagtttacagaatgtctgtttttaaagtcactttatgcgttttccacttttttcttttttaagaaaaagaagtaccatttttgttttgttttgttttgatttttggtggtggataaataatactaaaaggactctagtggaaaggggggatatcgaagagcagggggttgtgaatttccaggtacttggactttttgtagaagtagagagaagaagatgaagtttgccaggagggcccatattttttcagctgaagggtaaaatctttctttgcagagacagtattttgctgaatactttttataatgtgatgattattaaaaaagcaaaaattttggtcacttccaagctagaaggaggaatcagataccctttaatattttttcctcgctccttctggtatatgcatgtcactgcatgataattgagttttcctttgttttaataaaactgttctcagacattaagctaaactaagagaaaaataactttgttgccaaaaggttgtgctatccagattttttatatgtctgcatgtttaaaaaaaaaaaagcaacaaaagaaaatgcactctaacttatgtgaactgagagaaaaaaatcaggttttaaacaggaaaacctatggggaatgatattttttgaaagacttttgtataaagttgagtacttagaaaaaagacaaaccagatgtaatatattttgtggatgtttttatttcttggatttatagtaccttatactaaggttaaaaaaatatgcttgatattgtgaaaaggtgaaattcttcaccaacatttcatttgctcctttgtcatattgtaatgccaatataatatagttaatgaaaacagcatttttaaaaaccgaaatattgaaatggtgtaatgttgtaccatttgcactgtgagcaaatgctaatacagtaaatatattgtgtttgctgacaatcaaaaaaaaaaaaaaaaaaaa

SEQ ID NO: 125 - protein, 387 aa, Homo sapiens [sequence omitted]

SEQ ID NO: 126 - DNA, 2067 bp, Homo sapiens
ggaattccaatgaatgaatgaatgaatgagtgaatgaatcaacgaaggagtgagtcaaggcccgggaaccacagactccaagcctacgcagagcccgggaagggggattccggaggggcggggcctctttccggaagcgcccgccgggggcggggagggggcggggccatccgcgtgaggcgaccctgttggtccggaggggcggggcgaggaggaggacggccttgggcggttcggctgcccacagtaaccgctgggtggacctggccagcgctccgaaccttgtcctcgctgcgcgccggcccctcggagccccacagcccgggaaggaggcggccgcgggcggggcgcccgctctgccaagcggacccgcaacccggaaaggcggcgcggcggagcctggagccggatcctgctcagaccgggccccggccggccagagccgcgggcatgtcggaggcgcggaaggggccggacgaggcggaggagagccagtacgactctggcattgagtctctgcgctctctgcgctccctacccgagtccacctcggctccagcctccgggccctcggacggcagcccccagccctgcacccatcctccgggacccgtcaaggaaccacaggagaaggaagacgcggatggggagcgggctgattccacctatggctcctcctcgctcacctacaccctgtccttgctggggggccccgaggctgaggacccgcccccacgcctgccactcccccacgtgggggcgctgagccctcagcagctggaagcactcacttacatctccgaggacggagacacgctggtccacctggcagtgattcatgaggccccagcggtgctgctctgttgcctggctttgctgccccaggaggtcctggacattcaaaataacctttaccagacagcactccatctggctgtacatctggaccaaccgggcgcagttcgggcactggtgctgaagggggccagccgggcactacaggaccggcatggagacacagcccttcatgtggcctgccagcgccagtcttggcctgtgcccgctgcctgctggaagggcgggccagagccaggcagaggaacatctcactctctggacctccagctgcaaaactggcaaggtctggcttgtctccacattgccacccttcagaagaaccaaccactcatggaattgctgcttcggaatggagctgacattgatgtgcaggagggctccagtggtaagacagcgctgcacctggctgtggaaacccaagagcggggcctggtacagttcctgctccaggctggtgcccaggtagatgcccgcatgctgaacgggtgcacacccctgcacctggcagctggccggggtctcatgggcatctcatccactctgtgcaaggcgggtgctgactccctgctgcggaatgtggaggatgagacgccccaggacctgactgaggaatcccttgtccttttgccctttgatgacctgaagatctcagggaaactgctgctgtgtaccgactgaagccaggcagggtctgggatcctcagggctccacctctccatctggaagccggagccataactgctgcagtttgggcccaggctatgtgctcttctggtgccctagggactgctgtggccagagcctggggccagccagtacagtcctgagccgaggaggagggactgcaagtggaagagagccagtctggaaggaagagctttccaggtggacagggcttcttggaagacccccaaagccccaggtatcctgggtgaagcctgtttgcctctcttgaaaatggcaggtgctcttgttttacccatgttgggtcagcctgaaactgccaaccagtaggaagcatggactctcctgagtgagaagagactgaaataggagcaagcagaaccctgagaggtgtccatcttcttgctgttgaggaccctgaaacaccgttgtttaaagacttcacacagaaggctctgaactgagccactggggaagggaagtttcagtaacatgacactaaaatggcagagacgttaaaaaaa

SEQ ID NO: 127 - protein, 500 aa, Homo sapiens
MNQRRSESRPGNHRLQAYAEPGKGDSGGAGPLSGSARRGRGGGGAIRVRRPCWSGGAGRGGGRPWAVRLPTVTAGWTWPALRTLSSLRAGPSEPHSPGRRRPRAGRPLCQADPQPGKAARRSLEPDPAQTGPRPARAAGMSEARKGPDEAEESQYDSGIESLRSLRSLPESTSAPASGPSDGSPQPCTHPPGPVKEPQEKEDADGERADSTYGSSSLTYTLSLLGGPEAEDPPPRLPLPHVGALSPQQLEALTYISEDGDTLVHLAVIHEAPAVLLCCLALLPQEVLDIQNNLYQTALHLAVHLDQPGAVRALVLKGASRALQDRHGDTALHVACQRQSWPVPAACWKGGPEPGRGTSHSLDLQLQNWQGLACLHIATLQKNQPLMELLLRNGADIDVQEGSSGKTALHLAVETQERGLVQFLLQAGAQVDARMLNGCTPLHLAAGRGLMGISSTLCKAGADSLLRNVEDETPQDLTEESLVLLPFDDLKISGKLLLCTD

SEQ ID NO: 128 - DNA, 5176 bp, Homo sapiens
gaattcggcacgagacggtttcctccagaggtctccgcccctctgcccctatattcccagagctcgagtctgatccgggccttgccgggcaccctggaaaggcgggggtgatagtacagatggagacgcaactgcagagcattttcgaagaggtggtgaaaacggaagttatagaagaggcttttcctggcatgtttatggatactcctgaagatgagaaaacaaaactaattagctgtttgggggccttcagacagttttggggtggtctttctcaggagtctcatgaacagtgtatccagtggattgttaagtttattcatggtcagcatagtcctaaaagaatttcttttctttatgactgcttagcaatggcagttgagactggtctccttccacccaggctggtttgtgaatccctgataaactctgacactcttgagtgggaaagaacacagctttgggccttaacatttaaactggttcggaaaataattgggggagtggataacaagggtgttcgagatctcttaaaagtgattttggagaagattttgacaattcctaatacagtgagctctgctgttgtacagcagcttctggcagcaagagaggttatagcatatatcttggaaagaaatgcctgcttattaccagcctattttgcagtcactgagatcaggaaactgtatcctgaaggcaaacttccacactggttacttggaaacctagtatcagactttgtggataccttcaggcccacagcaaggataaactccatttgtggtcgctgtagtcttctgccagttgtaaataattcgggtgccatttgtaattcatggaaactggatcctgctactcttcgttttcctttgaaaggccttttgccatatgataaggatctgtttgaaccacagactgctttgttgagatatgtattggagcagccttattccagggatatggtctgcaatatgctaggtttaaataagcagcacaagcagcgctgccctgtgctggaggaccagttggtggatctggttgtttatgccatggagcgatctgagaccgaggagaagtttgacgatgggggaacaagccaactcctgtggcagcatctctcaagtcagctcattttctttgtgcttttccagtttgcaagttttccacatatggtgctttctcttcatcagaagttagcagggcgaggactgattaaaggcagagatcatcttatgtgggttctcctgcaattcatttctggaagtattcagaaaaatgcactagctgattttctccctgtgatgaagctcttcgacttgctatacccagaaaaagaatatatcccagttcctgatattaacaaaccccagtcaacccatgcctttgcaatgacctgtatttggattcatctcaatagaaaagctcaaaatgacaactccaagctacagattccaatacctcattccctaagacttcaccatgagttcctgcagcagagtctaagaaataaaagtttacagatgaatgactataagattgctctattgtgtaatgcatactctacaaattcagaatgttttacattacccatgggagctctggtagaaactatttatggaaatggaattatgaggatacctctccctggaacaaactgtatggcttcaggatctattacccccttacctatgaacctcctggattcactgacagttcatgccaaaatgagccttattcacagcattgcaaccagggtgataaaacttgctcatgcaaagtccagtgtggccttggctccagccctagtggaaacttacagtcgtttattggtctatatggaaatagagtctttgggcatcaaaggatttatcagtcagcttttgccaactgttttcaaatcacatgcatgggggatcttacacacactccttgagatgtttagctaccggatgcatcatattcagcctcattacagagttcagctcctgagtcatcttcatactttggctgcagttgcacaaacaaaccagaaccagctccatctttgtgtcgagagcactgctctcaggcttataacagcattaggtagctcagaggtacaaccgcagtttacacgcttccttagtgatcccaaaacagtgctctcagcagaatctgaagaactgaaccgagccttgatattgaccttggctagagcaactcatgtaacagatttttttacaggctctgattcaattcagggaacttggtgtaaagacatacttcagaccatcatgagtttcactcctcataattgggcttcacacaccctgagctgttttccaggcccactacaggcattcttcaaacaaaataatgtgcctcaggaaagccgttttaatctgaaaaaaaatgtggaggaggagtataggaagtggaagtcaatgagcaacgaaaacgacattattacccacttctctatgcagggctcccctcctctctttctttgtcttctctggaaaatgctcttggaaacagatcatattaatcagattggctatagagtattagagagaattggagccagggccttggtagcccatgtgaggacatttgcagatttcctggtatatgagttttctacatcagcagggggtcagcaactcaataaatgcattgaaattcttaatgacatggtatggaagtataacattgttacactggacagattaattctctgcctggccatgcgtagtcacgaaggaaatgaagcccaggtttgttatttcataattcagttgctgttactcaaaccaaacgattttagaaatcgagtaagtgactttgtgaaggaaaattccccagagcactggttacagaatgactggcacaccaagcacatgaattatcacaagaaatatccagagaagttgtattttgagggcctcgcggaacaggtggatcctccctgtacagatccagtctcctatctgcccatctattttgggaatgtgtgtcttcgattccttccagtatttgatatagtaatccacagatttttagagttgcttccggtatccaaatcactggagactctactggatcatctaggaggcttatataaatttcatgatcgtccagtgacttatctgtataacactctgcactattatgaaatgcacctgagagaccgcgcatttctcaaacgaaaactcgtccatgcgatcattggctctctgaaggataatcgaccgcagggctggtgtctaagtgacacttacctgaaatgcgctatgaatgcacgagaggaaaatccttgggttccagatgacacctactattgcagattgattggcagactagtcgatacgatggctggcaaatctcctggtccctttccaaactgtgactggagattcaatgagtttcccaacccagctgcccatgctctccatgttacttgtgtggagctcatggccttggcagtttcaggcaaagaagttgggaatgcccttctaaatgttgtcctaaaaagtcagcctttagtgccaagagagaacattacagcatggatgaatgcaattggtttgatcatcactgccctaccagagccatattggattgttcttcatgatcgaattgtgagtgtcatcagcagccccagcttgacgtctgaaacagagtgggttggctatccattccgcctctttgatttcactgcctgtcatcagtcgtactctgagatgagttgtagctatacgttagctcttgcacatgctgtgtggcaccattctagcatcggacaactttctctcattccaaagtttcttactgaagtacttcttcctatagtgaagaccgaattccagttgctttatgtataccatcttgttggaccatttttacaaagatttcagcaagagagaactcgttgtatgatagagattggtgtggcgttttatgacatgctgctgaatgttgaccagtgtagcacccatttaaattacatggatcccatctgtgacttcctctatcacatgaagtatatgtttactggtgacagcgtgaaagagcaagtagagaagattatctgtaacttaaaaccagctttaaaacttcgtcttcgattcatcacacacattagcaagatggagccagctgcagtgcctccacaagccatgaacagtgggtctccagcacctcagtctaatcaggtgcccgtgtctttaccagtaactcagtgaaagccagactgtactgtggagaaagtagaaatatatccgtctttgagagtggactcaaaccttttaaatctgaatgcgatcacactgtagtgatatagtagaagcagtgatgatattcagattgttttattttgattcaaatgatgaatctgttgacaccttataactcccatctccctatctatatttttgtctctaagagatcaagtaagatacatgttgttcatattcataacaacttattagagctatgtaggaacatagaggtatctgtgatcaaatgacttgtcattggcactttcagtctttcctattctagccgttgtttttgtttgtattttttattattaatgacatatttagtcttcagatatattattttaaaggcaccacacatgtaaaacagttattacaaatattttatacataaatctcttggtagattttcagaataatagagatttatatcaagaaaaggaatctagattttgttgcattgtaggagcaaacaaggcttcatattctttttaaaatgacttgaaattttattataaatttccatagtttctatcaaggtcaactggcagttttattacctttgctatggacttgaacttactgtataaaattagttggaagccatgtaagaaaataacatctgaaaattcttgaacttaaaatcatgcttaaatggttgattctccaatttctttttttaaaaataagttaattgcttttgcaggttgacactctcacctgacagatgatgtaattcttcaatttttataatcttaaaatttttaaattttatatttgtaaatacagtacacattttatttcttggattttgagagacattgttaattttgggggaattggcattgcgaaagacttgaaaactaatgagtaaagtctgctgaatgaataaaaaaaaaaaaaaaaaactcgag

SEQ ID NO: 129 - protein, 1368 aa, Homo sapiens
METQLQSIFEEVVKTEVIEEAFPGMFMDTPEDEKTKLISCLGAFRQFWGGLSQESHEQCIQWIVKFIHGQHSPKRISFLYDCLAMAVETGLLPPRLVCESLINSDTLEWERTQLWALTFKLVRKIIGGVDNKGVRDLLKVILEKILTIPNTVSSAVVQQLLAAREVIAYILERNACLLPAYFAVTEIRKLYPEGKLPHWLLGNLVSDFVDTFRPTARINSICGRCSLLPVVNNSGAICNSWKLDPATLRFPLKGLLPYDKDLFEPQTALLRYVLEQPYSRDMVCNMLGLNKQHKQRCPVLEDQLVDLVVYAMERSETEEKFDDGGTSQLLWQHLSSQLIFFVLFQFASFPHMVLSLHQKLAGRGLIKGRDHLMWVLLQFISGSIQKNALADFLPVMKLFDLLYPEKEYIPVPDINKPQSTHAFAMTCIWIHLNRKAQNDNSKLQIPIPHSLRLHHEFLQQSLRNKSLQMNDYKIALLCNAYSTNSECFTLPMGALVETIYGNGIMRIPLPGTNCMASGSITPLPMNLLDSLTVHAKMSLIHSIATRVIKLAHAKSSVALAPALVETYSRLLVYMEIESLGIKGFISQLLPTVFKSHAWGILHTLLEMFSYRMHHIQPHYRVQLLSHLHTLAAVAQTNQNQLHLCVESTALRLITALGSSEVQPQFTRFLSDPKTVLSAESEELNRALILTLARATHVTDFFTGSDSIQGTWCKDILQTIMSFTPHNWASHTLSCFPGPLQAFFKQNNVPQESRFNLKKNVEEEYRKWKSMSNENDIITHFSMQGSPPLFLCLLWKMLLETDHINQIGYRVLERIGARALVAHVRTFADFLVYEFSTSAGGQQLNKCIEILNDMVWKYNIVTLDRLILCLAMRSHEGNEAQVCYFIIQLLLLKPNDFRNRVSDFVKENSPEHWLQNDWHTKHMNYHKKYPEKLYFEGLAEQVDPPCTDPVSYLPIYFGNVCLRFLPVFDIVIHRFLELLPVSKSLETLLDHLGGLYKFHDRPVTYLYNTLHYYEMHLRDRAFLKRKLVHAIIGSLKDNRPQGWCLSDTYLKCAMNAREENPWVPDDTYYCRLIGRLVDTMAGKSPGPFPNCDWRFNEFPNPAAHALHVTCVELMALAVSGKEVGNALLNVVLKSQPLVPRENITAWMNAIGLIITALPEPYWIVLHDRIVSVISSPSLTSETEWVGYPFRLFDFTACHQSYSEMSCSYTLALAHAVWHHSSIGQLSLIPKFLTEVLLPIVKTEFQLLYVYHLVGPFLQRFQQERTRCMIEIGVAFYDMLLNVDQCSTHLNYMDPICDFLYHMKYMFTGDSVKEQVEKIICNLKPALKLRLRFITHISKMEPAAVPPQAMNSGSPAPQSNQVPVSLPVTQ

SEQ ID NO: 130 - DNA, 2808 bp, Homo sapiens
ggcccccaaagccggtctagcgcgccgggcgtcttccttacttccgctgccgccgccgccacatcccgggacccgacgggccgcggcgcggaggcctcggggcaaggtggggcgggcctcccgagctcccaggaccccgcgcgcttcgcccacaggcccggcgaagcccgacccgcgcggcgcccccagggccaggggaggagcctaaggacccggacgagcgccgctccagtaggtgacaagaggaaacaagaacctcagttcaggggaaacacagcaaggaaatgtgagccccaggctgcagaaggaagagtcagtgaatggctgcggtgtgacaacatgcaccaccagtggcttctgctggccgcatgcttttgggtgattttcatgttcatggtggctagcaagttcatcacgttgacctttaaagacccagatgtgtacagtgccaaacaggagtttctgttcctgacaaccatgccggaagtgaggaagttgccagaagagaagcacattcctgaggaactgaagccaactgggaaggagcttccagacagccagctcgttcagcccctggtctacatggagcgcctggaactcatcagaaacgtctgcagggatgatgccctgaagaatctctcgcacactcctgtctccaagtttgtcctggaccgaatatttgtctgtgacaagcacaagattcttttctgccagactcccaaagtgggcaacacccagtggaagaaagtgctgattgttctaaatggagcattttcttccattgaggagatccccgaaaacgtggtgcacgaccacgagaagaacggccttcctcggctctcttccttcagtgatgcagaaattcagaagcgattgaaaacatacttcaagttttttattgtaagagatcccttcgaaagacttatttctgcatttaaggataaatttgttcacaatccccggtttgagccttggtacaggcatgagattgctcctggcatcatcagaaaatacaggaggaaccggacagagacgcgggggatccagtttgaagatttcgtgcgctacctcggcgatccgaaccacagatggctagaccttcagtttggggaccacatcattcactgggtgacgtatgtagagctctgtgctccctgtgagataatgtacagtgtgattggacaccacgagaccctggaggacgatgccccatacatcttaaaagaggctggcattgaccacctggtgtcatacccgactatccctccgggcattaccgtgtataacagaaccaaggtggagcactatttcctgggcatcagcaaacgagacatccgacgcctgtatgcccgtttcgaaggggactttaagctctttgggtaccagaaaccagactttttgctaaactaatgcataagacctatgaattcaaatatctttattagacctggggctaaccaggtgaagatctgagcccagaaatgacccttcctccaccacacccctcctttgaggatgcccggggtctcccacaggcctgtgagttgcctcggcatatgacgcagaaccccaactgttacaacttagtttggatgtaagatgctctgaggaccctgcccacacccctgcgtgcattaggatgtcgctggcctttgctcacctcagaggggagaaaaggctaaagatttgcagtttgacagcccagcagggaggaagcatcacacagcgttaggagccgtttccttcaggtgttaaggaaggggatgcccctgaggttctcctggctagtcggggtggcttcacccatcactggtgggttgcaggaacagcacccaggactctgaggagggacagagaagcaagggggctgctgaaatcgcagagacttttgcagcatcagatctgaggagtaaaacggcacctctggccttcatcttggtgctgcgacaattgtggaggcaaagcattctttctgtgactattttgttcctgtagacagtcagcgatggccagagggtggtgtggtgtccaggggtccatctttccagaatccatgcctgtgtaatgctggtccatgcttctgaacctgtgtctgccaagcgcctatttcattcagcacaagacatacgattttagaaggtgaggggaggggaggctttttctacctgagaaggggagtgtctttgagggccttaaaaggaccatggcccaggaatgggggcgctggttgggcttggagctcaggctgctgtggatcccggcgcatcagttctgacttgccttacctgggtggacagcagtgaatctccacctgtcttctccagggagctcccatgttggggctgaagacgagcaggggcaacctgccagcatcacagaattcagtgtagtttatacatttcgattcctttcatctcagcaaaatgggcactgccagagccatttctgatcacaccaccatcctggaccatgtgactggaaggtgggtaaccaagttcaccagcaataaaacccagcgcccaggtagcctccagcagtgcggcttcctggcaacaaggtaggccctggtgcagggcaagccgcagcgaccatttcagataccgtccacagccaggaccgctgagaactgggacagtttcctgggatgagtgccagcctgagcctgcatggtgccgccgagcccggggtggaggagggagccaggcttcgcttcaaggcggcctctaccttttctcagaatggtttcctgattgtgtcaatgtgaaagttaaataaaatttatgtgccaaacctgaaaaaaaaaaaaaa

SEQ ID NO: 131 - protein, 356 aa, Homo sapiens
MHHQWLLLAACFWVIFMFMVASKFITLTFKDPDVYSAKQEFLFLTTMPEVRKLPEEKHIPEELKPTGKELPDSQLVQPLVYMERLELIRNVCRDDALKNLSHTPVSKFVLDRIFVCDKHKILFCQTPKVGNTQWKKVLIVLNGAFSSIEEIPENVVHDHEKNGLPRLSSFSDAEIQKRLKTYFKFFIVRDPFERLISAFKDKFVHNPRFEPWYRHEIAPGIIRKYRRNRTETRGIQFEDFVRYLGDPNHRWLDLQFGDHIIHWVTYVELCAPCEIMYSVIGHHETLEDDAPYILKEAGIDHLVSYPTIPPGITVYNRTKVEHYFLGISKRDIRRLYARFEGDFKLFGYQKPDFLLN

SEQ ID NO: 132 - DNA, 1638 bp, Homo sapiens
ggaattccctgatatacacctggaccaccaccaatggatatacaaatggcaaacaattttactccgccctctgcaactcctcagggaaatgactgtgacctctatgcacatcacagcacggccaggatagtaatgcctctgcattacagcctcgtcttcatcattgggctcgtgggaaacttactagccttggtcgtcattgttcaaaacaggaaaaaaatcaactctaccaccctctattcaacaaatttggtgatttctgatatactttttaccaccgctttgcctacacgaatagcctactatgcaatgggctttgactggagaatcggagatgccttgtgtaggataactgcgctagtgttttacatcaacacatatgcaggtgtgaactttatgacctgcctgagtattgaccgcttcattgctgtggtgcaccctctacgctacaacaagataaaaaggattgaacatgcaaaaggcgtgtgcatatttgtctggattctagtatttgctcagacactcccactcctcatcaaccctatgtcaaagcaggaggctgaaaggattacatgcatggagtatccaaactttgaagaaactaaatctcttccctggattctgcttggggcatgtttcataggatatgtacttccacttataatcattctcatctgctattctcagatctgctgcaaactcttcagaactgccaaacaaaacccactcactgagaaatctggtgtaaacaaaaaggctctcaacacaattattcttattattgttgtgtttgttctctgtttcacaccttaccatgttgcaattattcaacatatgattaagaagcttcgtttctctaatttcctggaatgtagccaaagacattcgttccagatttctctgcactttacagtatgcctgatgaacttcaattgctgcatggacccttttatctacttctttgcatgtaaagggtataagagaaaggttatgaggatgctgaaacggcaagtcagtgtatcgatttctagtgctgtgaagtcagcccctgaagaaaattcacgtgaaatgacagaaacgcagatgatgatacattccaagtcttcaaatggaaagtgaaatggattgtattttggtttatagtgacgtaaactgtatgacaaactttgcaggacttcccttataaagcaaaataattgttcagcttccaattagtattcttttatatttctttcattgggcactttcccatctccaactcggaagtaagcccaagagaacaacataaagcaaacaacataaagcacaataaaaatgcaaataaatattttcatttttatttgtaaacgaatacaccaaaaggaggcgctcttaataactcccaatgtaaaaagttttgttttaataaaaaatttaattattatttcttgccaacaaatggctagaaaggactgaatagattatatattgccagatgttaatactgtaacatactttttaaataacatatttcttaaatccaaatttctctcaatgttagatttaattccctcaataacaccaatgttttgttttgtttcgttctgggtcataaaactttgttaaggaactcttttggaataaagagcaggatgctgc

SEQ ID NO: 133 - protein, 361 aa, Homo sapiens [sequence omitted]

SEQ ID NO: 134 - DNA, 1305 bp, Homo sapiens
cgcggctcagtaattgaaggcctgaaacgcccatgtgccactgactaggaggcttccctgctgcggcacttcatgacccagcggcgcgcggcccagtgaagccaccgtggtgtccagcatggccgcgctgctcctgggcgcggtgctgctggtggcccagccccagctagtgccttcccgccccgccgagctaggccagcaggagcttctgcggaaagcggggaccctccaggatgacgtccgcgatggcgtggccccaaacggctctgcccagcagttgccgcagaccatcatcatcggcgtgcgcaagggcggcacgcgcgcactgctggagatgctcagcctgcaccccgacgtggcggccgcggagaacgaggtccacttcttcgactgggaggagcattacagccacggcttgggctggtacctcagccagatgcccttctcctggccacaccagctcacagtggagaagacccccgcgtatttcacgtcgcccaaagtgcctgagcgagtctacagcatgaacccgtccatccggctgctgctcatcctgcgagacccgtcggagcgcgtgctatctgactacacccaagtgttctacaaccacatgcagaagcacaagccctacccgtccatcgaggagttcctggtgcgcgatggcaggctcaatgtggactacaaggccctcaaccgcagcctctaccacgtgcacatgcagaactggctgcgctttttcccgctgcgccacatccacattgtggacggcgaccgcctcatcagggaccccttccctgagatccaaaaggtcgagaggttcctaaagctgtcgccgcagatcaatgcttcgaacttctactttaacaaaaccaagggcttttactgcctgcgggacagcggccgggaccgctgcttacatgagtccaaaggccgggcgcacccccaagtcgatcccaaactactcaataaactgcacgaatattttcatgagccaaataagaagttcttcgagcttgttggcagaacatttgactggcactgatttgcaataagctaagctcagaaactttcctactgtaagttctggtgtacatctgaggggaaaaagaattttaaaaaagcatttaaggtataatttatttgtaaaatccataaagtacttctgtacagtattagattcacaattgccatatatactagttatatttttctacttgttaaatggagggcattttgtattgtttttcatggttgttaacattgtgtaatatgtctctatatgaaggaactaaactatttcactga

SEQ ID NO: 135 - protein, 307 aa, Homo sapiens
MAALLLGAVLLVAQPQLVPSRPAELGQQELLRKAGTLQDDVRDGVAPNGSAQQLPQTIIIGVRKGGTRALLEMLSLHPDVAAAENEVHFFDWEEHYSHGLGWYLSQMPFSWPHQLTVEKTPAYFTSPKVPERVYSMNPSIRLLLILRDPSERVLSDYTQVFYNHMQKHKPYPSIEEFLVRDGRLNVDYKALNRSLYHVHMQNWLRFFPLRHIHIVDGDRLIRDPFPEIQKVERFLKLSPQINASNFYFNKTKGFYCLRDSGRDRCLHESKGRAHPQVDPKLLNKLHEYFHEPNKKFFELVGRTFDWH

SEQ ID NO: 136 - DNA, 1813 bp, Homo sapiens
ccgtccccggcggccccatgccccgatgccccgcgggggccatggacgaggggcccgtggacctgcgcacccggcccaaggccgccggactcccgggcgccgcgctgccgctccgcaagcgcccgctgcgcgcgccctccccggagcccgccgctccccgcggcgctgcgggccttgtcgtccccctggaccctctgcgcggcggctgcgacctgccggcggtccccgggcccccccacggcctggcccggccggaggcgctttactaccccggagccttactgcctttgtaccccactcgggccatgggctccccgtttcctctggtgaacctgcctacacccctataccccatgatgtgccccatggaacaccccctttctgctgacatcgccatggccacccgtgcagatgaggacggagacacgcctctccatattgctgtggtgcagggtaacctgccagctgtgcaccggctggtcaacctcttccagcaggggggccgggagctcgacatctacaacaacctacggcagacaccgctccacctggctgtgatcaccacattaccgtctgtggtccggctcctggtgacagctggtgccagccccatggcgctggaccgccatggccagacggccgctcacctggcgtgcgagcaccgcagcccgacctgcctgcgagccctgctggacagcgcagctccgggcacgttggacctggaggcccgcaattatgacgggctcaccgccctgcacgtggcagtgaacaccgagtgccaagaaaccgtgcagctcttgctagagcgcggtgccgacatcgacgcagtggacattaagagcggccgctccccgctcatccacgccgtggaaaacaacagccttagcatggtgcagctgctgctgcagcacggcgccaacgtgaacgcgcaaatgtactccggcagctccgccctgcactcagcgtccggccgcgggctcctcccgctggtgcgcacgctggtccgcagcggcgctgacagcagcctcaagaactgccacaacgacacgccgctcatggtggcgcgcagccgcagggtcatcgacatcctgagggggaaggccacccggcctgcttccacctcccagccagacccctcccctgaccggagcgccaacacctcccccgagagcagcagccgcctcagctccaatggtcttctctccgcatcaccatcctcctcaccctcccagtctccccccagggacccccctggattccccatggctcctcccaatttcttccttccttccccatctccacccgccttcctgccctttgctggggtcctccgaggccctggccggccggtgcccccctccccagctccaggaggcagctgagggggatgggggggcagatcttggactcatgaggaggggcccccctgcccagaggggtcaacccttctggaaactgtgaagatctgacttcgcccccccccccccccatcttcgggaccaggatttgcacagaagcacatgcacctacccatacaccccctcttctgagcacagatgttcccccatctcgctccctcccaggactctgaccccagcattctcaggcaccagtccctgtccggaatgccacccacatcttccatttccatgtcccctcccagagctggtggacccagggaacagccactcccctccactctctaccagataactgaggaggggagaggtgggccgtaacgggcacggatcacgatgtaaattattaagcattttggttggatttcttttgtaataaactatttttgtaccat

SEQ ID NO: 137 - protein, 446 aa, Homo sapiens
MDEGPVDLRTRPKAAGLPGAALPLRKRPLRAPSPEPAAPRGAAGLVVPLDPLRGGCDLPAVPGPPHGLARPEALYYPGALLPLYPTRAMGSPFPLVNLPTPLYPMMCPMEHPLSADIAMATRADEDGDTPLHIAVVQGNLPAVHRLVNLFQQGGRELDIYNNLRQTPLHLAVITTLPSVVRLLVTAGASPMALDRHGQTAAHLACEHRSPTCLRALLDSAAPGTLDLEARNYDGLTALHVAVNTECQETVQLLLERGADIDAVDIKSGRSPLIHAVENNSLSMVQLLLQHGANVNAQMYSGSSALHSASGRGLLPLVRTLVRSGADSSLKNCHNDTPLMVARSRRVIDILRGKATRPASTSQPDPSPDRSANTSPESSSRLSSNGLLSASPSSSPSQSPPRDPPGFPMAPPNFFLPSPSPPAFLPFAGVLRGPGRPVPPSPAPGGS

SEQ ID NO: 138 - DNA, 3096 bp, Homo sapiens
cgggcgcccagagggcaaatgaggggcggcggggtggcgggtcggggggagacgcggaatttcccagcgcgggggctctggcttaccctgcaaccgggcagtctctttctgtttacggagagaaaggggaaatggaaaagtcggggaggcggtggctggcgtccgctgcgccgcccctgggcaggctcagacgccgtgagtcaggggcagagcagggcggtctgagcgtgcgggcgacgcgggtctcactcgtccgctccgctctggactgcgcgccacgctctggggtccggcgccctggttcctgcttctgccgctgccgccgccggatcccagtggcccggcgtgctcggctcccacaggcctgcagccagcatcgcaccgaaccttcggggggccgcggctggagcgctcggccggcgtgggagcgccaaggccgcagatgcaatcttcttaccgcgaagaagccaggggaataggtagccacatcttgtttgcagataagaaaggaagctaacgcagtatctgcaaagccaggagtctgactcagtacttttctcactcatgcatacaaagcagctaaaaatgacacagcttatttaccatgcccctgacactgcactgagcactttatgagcttgaactctgttaatcctcacgaccacctcatgagactctccagaaagagcaacagtaatggagtacatgagcactggaagtgacaataaagaagagattgatttattaattaaacatttaaatgtgtctgatgtaatagacattatggaaaatctttatgcaagtgaagagccagcagtttatgaacccagtctaatgaccatgtgtcaagacagtaatcaaaacgatgagcgttctaagtctctgctgcttagtggccaagaggtaccatggttgtcatcagtcagatatggaactgtggaggatttgcttgcttttgcaaaccatatatccaacactgcaaagcatttttatggacaacgaccacaggaatctggaattttattaaacatggtcatcactccccaaaatggacgttaccaaatagattccgatgttctcctgatcccctggaagctgacttacaggaatattggttctgattttattcctcggggcgcctttggaaaggtatacttggcacaagatataaagacgaagaaaagaatggcgtgtaaactgatcccagtagatcaatttaagccatctgatgtggaaatccaggcttgcttccggcacgagaacatcgcagagctgtatggcgcagtcctgtggggtgaaactgtccatctctttatggaagcaggcgagggagggtctgttctggagaaactggagagctgtggaccaatgagagaatttgaaattatttgggtgacaaagcatgttctcaagggacttgattttctacactcaaagaaagtgatccatcatgatattaaacctagcaacattgttttcatgtccacaaaagctgttttggtggattttggcctaagtgttcaaatgaccgaagatgtctattttcctaaggacctccgaggaacagagatttacatgagcccagaggtcatcctgtgcaggggccattcaaccaaagcagacatctacagcctgggggccacgctcatccacatgcagacgggcaccccaccctgggtgaagcgctaccctcgctcagcctatccctcctacctgtacataatccacaagcaagcacctccactggaagacattgcagatgactgcagtccagggatgagagagctgatagaagcttccctggagagaaaccccaatcaccgcccaagagccgcagacctactaaaacatgaggccctgaacccgcccagagaggatcagccacgctgtcagagtctggactctgccctcttggagcgcaagaggctgctgagtaggaaggagctggaacttcctgagaacattgctgattcttcgtgcacaggaagcaccgaggaatctgagatgctcaagaggcaacgctctctctacatcgacctcggcgctctggctggctacttcaatcttgttcggggaccaccaacgcttgaatatggctgaaggatgccatgtttgctctaaattaagacagcattgatctcctggaggctggttctgctgcctctacacaggggccctgtacagtgaatggtgccattttcgaaggagcagtgtgacctcctgtgacccatgaatgtgcctccaagcggccctgtgtgtttgacatgtgaagctatttgatatgcaccaggtctcaaggttctcatttctcaggtgacgtgattctaaggcaggaatttgagagttcacagaaggatcgtgtctgctgactgtttcattcactgtgcactttgctcaaaattttaaaaataccaatcacaaggataatagagtagcctaaaattactattcttggttcttatttaagtatggaatattcattttactcagaatagctgttttgtgtatattggtgtatattatataactctttgagcctttattggtaaattctggtatacattgaattcattataatttgggtgactagaacaacttgaagattgtagcaataagctggactagtgtcctaaaaatggctaactgatgaattagaagccatctgacagcaggccactagtgacagtttcttttgtgttcctatggaaacattttatactgtacatgctatgctgaagacattcaaaacgtgatgttttgaatgtggataaaactgtgtaaaccacataatttttgtacatcccaaaggatgagaatgtgacctttaagaaaaatgaaaacttttgtaaattattgatgattttgtaattcttatgactaaattttcttttaagcatttgtatattaaaatagcatactgtgtatgttttatatcaaatgccttcatgaatctttcatacatatatatatttgtaacattgtaaagtatgtgagtagtcttatgtaaagtatgtttttacattatgcaaataaaacccaatacttttgtccaatgtggttggtcaaatcaactgaataaattcagtattttgcctt

SEQ ID NO: 139 - protein, 467 aa, Homo sapiens [sequence omitted]

SEQ ID NO: 140 - DNA, 2387 bp, Homo sapiens
gctgctgcgacagtccactacctttttcgagagtgactcccgttgtcccaaggcttcccagagcgaacctgtgcggctgcaggcaccggcgcgtcgagtttccggcgtccggaaggaccgagctcttctcgcggatccagtgttccgtttccagcccccaatctcagagccgagccgacagagagcagggaaccggcatggccaaagccgcggcgatcggcatcgacctgggcaccacctactcctgcgtgggggtgttccaacacggcaaggtggagatcatcgccaacgaccagggcaaccgcaccacccccagctacgtggccttcacggacaccgagcggctcatcggggatgcggccaagaaccaggtggcgctgaacccgcagaacaccgtgtttgacgcgaagcggctgatcggccgcaagttcggcgacccggtggtgcagtcggacatgaagcactggcctttccaggtgatcaacgacggagacaagcccaaggtgcaggtgagctacaagggggacaccaaggcattctaccccgaggagatctcgtccatggtgctgaccaagatgaaggagatcgccgaggcgtacctgggctacccggtgaccaacgcggtgatcaccgtgccggcctacttcaacgactcgcagcgccaggccaccaaggatgcgggtgtgatcgcggggctcaacgtgctgcggatcatcaacgagcccacggccgccgccatcgcctacggcctggacagaacgggcaagggggagcgcaacgtgctcatctttgacctgggcgggggcaccttcgacgtgtccatcctgacgatcgacgacggcatcttcgaggtgaaggccacggccggggacacccacctgggtggggaggactttgacaacaggctggtgaaccacttcgtggaggagttcaagagaaaacacaagaaggacatcagccagaacaagcgagccgtgaggcggctgcgcaccgcctgcgagagggccaagaggaccctgtcgtccagcacccaggccagcctggagatcgactccctgtttgagggcatcgacttctacacgtccatcaccagggcgaggttcgaggagctgtgctccgacctgttccgaagcaccctggagcccgtggagaaggctctgcgcgacgccaagctggacaaggcccagattcacgacctggtcctggtcgggggctccacccgcatccccaaggtgcagaagctgctgcaggacttcttcaacgggcgcgacctgaacaagagcatcaaccccgacgaggctgtggcctacggggcggcggtgcaggcggccatcctgatgggggacaagtccgagaacgtgcaggacctgctgctgctggacgtggctcccctgtcgctggggctggagacggccggaggcgtgatgactgccctgatcaagcgcaactccaccatccccaccaagcagacgcagatcttcaccacctactccgacaaccaacccggggtgctgatccaggtgtacgagggcgagagggccatgacgaaagacaacaatctgttggggcgcttcgagctgagcggcatccctccggcccccaggggcgtgccccagatcgaggtgaccttcgacatcgatgccaacggcatcctgaacgtcacggccacggacaagagcaccggcaaggccaacaagatcaccatcaccaacgacaagggccgcctgagcaaggaggagatcgagcgcatggtgcaggaggcggagaagtacaaagcggaggacgaggtgcagcgcgagagggtgtcagccaagaacgccctggagtcctacgccttcaacatgaagagcgccgtggaggatgaggggctcaagggcaagatcagcgaggccgacaagaagaaggtgctggacaagtgtcaagaggtcatctcgtggctggacgccaacaccttggccgagaaggacgagtttgagcacaagaggaaggagctggagcaggtgtgtaaccccatcatcagcggactgtaccagggtgccggtggtcccgggcctgggggcttcggggctcagggtcccaagggagggtctgggtcaggccccaccattgaggaggtagattaggggcctttccaagattgctgtttttgttttggagcttcaagactttgcatttcctagtatttctgtttgtcagttctcaatttcctgtgtttgcaatgttgaaattttttggtgaagtactgaacttgctttttttccggtttctacatgcagagatgaatttatactgccatcttacgactatttcttctttttaatacacttaactcaggccattttttaagttggttacttcaaagtaaataaactttaaaattcaagtga

SEQ ID NO: 141 - protein, 641 aa, Homo sapiens
MAKAAAIGIDLGTTYSCVGVFQHGKVEIIANDQGNRTTPSYVAFTDTERLIGDAAKNQVALNPQNTVFDAKRLIGRKFGDPVVQSDMKHWPFQVINDGDKPKVQVSYKGDTKAFYPEEISSMVLTKMKEIAEAYLGYPVTNAVITVPAYFNDSQRQATKDAGVIAGLNVLRIINEPTAAAIAYGLDRTGKGERNVLIFDLGGGTFDVSILTIDDGIFEVKATAGDTHLGGEDFDNRLVNHFVEEFKRKHKKDISQNKRAVRRLRTACERAKRTLSSSTQASLEIDSLFEGIDFYTSITRARFEELCSDLFRSTLEPVEKALRDAKLDKAQIHDLVLVGGSTRIPKVQKLLQDFFNGRDLNKSINPDEAVAYGAAVQAAILMGDKSENVQDLLLLDVAPLSLGLETAGGVMTALIKRNSTIPTKQTQIFTTYSDNQPGVLIQVYEGERAMTKDNNLLGRFELSGIPPAPRGVPQIEVTFDIDANGILNVTATDKSTGKANKITITNDKGRLSKEEIERMVQEAEKYKAEDEVQRERVSAKNALESYAFNMKSAVEDEGLKGKISEADKKKVLDKCQEVISWLDANTLAEKDEFEHKRKELEQVCNPIISGLYQGAGGPGPGGFGAQGPKGGSGSGPTIEEVD

SEQ ID NO: 142 - DNA, 3220 bp, Homo sapiens
gagctgtccccggtgccgccgacccgggccgtgccgtgtgcccgtggctccagccgctgccgcctcgatctcctcgtctcccgctccgccctcccttttccctggatgaacttgcgtcctttctcttctccgccatggaattctgctccgtgcttttagccctcctgagccaaagaaaccccagacaacagatgcccatacgcagcgtatagcagtaactccccagctcggtttctgtgccgtagtttacagtatttaattttatataatatatattatttattatagcatttttgatacctcatattctgtttacacatcttgaaaggcgctcagtagttctcttactaaacaaccactactccagagaatggcaacgctgattaccagtactacagctgctaccgccgcttctggtcctttggtggactacctatggatgctcatcctgggcttcattattgcatttgtcttggcattctccgtgggagccaatgatgtagcaaattcttttggtacagctgtgggctcaggtgtagtgaccctgaagcaagcctgcatcctagctagcatctttgaaacagtgggctctgtcttactgggggccaaagtgagcgaaaccatccggaagggcttgattgacgtggagatgtacaactcgactcaagggctactgatggccggctcagtcagtgctatgtttggttctgctgtgtggcaactcgtggcttcgtttttgaagctccctatttctggaacccattgtattgttggtgcaactattggtttctccctcgtggcaaaggggcaggagggtgtcaagtggtctgaactgataaaaattgtgatgtcttggttcgtgtccccactgctttctggaattatgtctggaattttattcttcctggttcgtgcattcatcctccataaggcagatccagttcctaatggtttgcgagctttgccagttttctatgcctgcacagttggaataaacctcttttccatcatgtatactggagcaccgttgctgggctttgacaaacttcctctgtggggtaccatcctcatctcggtgggatgtgcagttttctgtgcccttatcgtctggttctttgtatgtcccaggatgaagagaaaaattgaacgagaaataaagtgtagtccttctgaaagccccttaatggaaaaaaagaatagcttgaaagaagaccatgaagaaacaaagttgtctgttggtgatattgaaaacaagcatcctgtttctgaggtagggcctgccactgtgcccctccaggctgtggtggaggagagaacagtctcattcaaacttggagatttggaggaagctccagagagagagaggcttcccagcgtggacttgaaagaggaaaccagcatagatagcaccgtgaatggtgcagtgcagttgcctaatgggaaccttgtccagttcagtcaagccgtcagcaaccaaataaactccagtggccactcccagtatcacaccgtgcataaggattccggcctgtacaaagagctactccataaattacatcttgccaaggtgggagattgcatgggagactccggtgacaaacccttaaggcgcaataatagctatacttcctataccatggcaatatgtggcatgcctctggattcattccgtgccaaagaaggtgaacagaagggcgaagaaatggagaagctgacatggcctaatgcagactccaagaagcgaattcgaatggacagttacaccagttactgcaatgctgtgtctgaccttcactcagcatctgagatagacatgagtgtcaaggcagcgatgggtctaggtgacagaaaaggaagtaatggctctctagaagaatggtatgaccaggataagcctgaagtctctctcctcttccagttcctgcagatccttacagcctgctttgggtcattcgcccatggtggcaatgacgtaagcaatgccattgggcctctggttgctttatatttggtttatgacacaggagatgtttcttcaaaagtggcaacaccaatatggcttctactctatggtggtgttggtatctgtgttggtctgtgggtttggggaagaagagttatccagaccatggggaaggatctgacaccgatcacaccctctagtggcttcagtattgaactggcatctgccctcactgtggtgattgcatcaaatattggccttcccatcagtacaacacattgtaaagtgggctctgttgtgtctgttggctggctccggtccaagaaggctgttgactggcgtctctttcgtaacatttttatggcctggtttgtcacagtccccatttctggagttatcagtgctgccatcatggcaatcttcagatatgtcatcctcagaatgtgaagctgtttgagattaaaatttgtgtcaatgtttgggaccatcttaggtattcctgctcccctgaagaatgattacagtgttaacagaagactgacaagagtctttttatttgggagcagaggagggaagtgttacttgtgctataactgcttttgtgctaaatatgaattgtctcaaaattagctgtgtaaaatagcccgggttccactggctcctgctgaggtcccctttccttctgggctgtgaattcctgtacatatttctctactttttgtatcaggcttcaattccattatgttttaatgttgtctctgaagatgacttgtgatttttttttcttttttttaaaccatgaagagccgtttgacagagcatgctctgcgttgttggtttcaccagcttctgccctcacatgcacagggatttaacaacaaaaatataactacaacttcccttgtagtctcttatataagtagagtccttggtactctgccctcctgtcagtagtggcaggatctattggcatattcgggagcttcttagagggatgaggttctttgaacacagtgaaaatttaaattagtaacttttttgcaagcagtttattgactgttattgctaagaagaagtaagaaagaaaaagcctgttggcaatcttggttatttctttaagatttctggcagtgtgggatggatgaatgaagtggaatgtgaactttgggcaagttaaatgggacagccttccatgttcatttgtctacctcttaactgaataaaaaagcctacagtttttagaaaaaacccgaattc

SEQ ID NO: 143 - protein, 679 aa, Homo sapiens
MATLITSTTAATAASGPLVDYLWMLILGFIIAFVLAFSVGANDVANSFGTAVGSGVVTLKQACILASIFETVGSVLLGAKVSETIRKGLIDVEMYNSTQGLLMAGSVSAMFGSAVWQLVASFLKLPISGTHCIVGATIGFSLVAKGQEGVKWSELIKIVMSWFVSPLLSGIMSGILFFLVRAFILHKADPVPNGLRALPVFYACTVGINLFSIMYTGAPLLGFDKLPLWGTILISVGCAVFCALIVWFFVCPRMKRKIEREIKCSPSESPLMEKKNSLKEDHEETKLSVGDIENKHPVSEVGPATVPLQAVVEERTVSFKLGDLEEAPERERLPSVDLKEETSIDSTVNGAVQLPNGNLVQFSQAVSNQINSSGHSQYHTVHKDSGLYKELLHKLHLAKVGDCMGDSGDKPLRRNNSYTSYTMAICGMPLDSFRAKEGEQKGEEMEKLTWPNADSKKRIRMDSYTSYCNAVSDLHSASEIDMSVKAAMGLGDRKGSNGSLEEWYDQDKPEVSLLFQFLQILTACFGSFAHGGNDVSNAIGPLVALYLVYDTGDVSSKVATPIWLLLYGGVGICVGLWVWGRRVIQTMGKDLTPITPSSGFSIELASALTVVIASNIGLPISTTHCKVGSVVSVGWLRSKKAVDWRLFRNIFMAWFVTVPISGVISAAIMAIFRYVILRM

SEQ ID NO: 144 - DNA, 4163 bp, Homo sapiens
ttgatttggtatagtgggaacatttgctttggagacagatgaactggattctgatcgtgaccctgctattttctccttgtgtgactttggagccatgagaccccagatcctgctgctcctggccctgctgaccctaggcctggctgcacaacaccaagacaaagtgccctgtaagatggtggacaagaaggtctcgtgccaggttctgggcctgctccaggtcccctcggtgctcccgccagacactgagacccttgatctatctgggaaccagctgcggagtatcctggcctcacccctgggcttctacacggcacttcgtcacctggacctgagcaccaatgagatcagcttcctccagccaggagccttccaggccctgacccacctggagcacctcagcctggctcacaaccggctggcgatggccactgcgctgagtgctggtggcctgggccccctgccacgcgtgacctccctggacctgtctgggaacagcctgtacagcggcctgctggagcggctgctgggggaggcacccagcctgcataccctctcactggcggagaacagtctgactcgcctcacccgccacaccttccgggacatgcctgcgctggagcagcttgacctgcatagcaacgtgctgatggacatcgaggatggcgccttcgagggcctgccccgcctgacccatctcaacctctccaggaattccctcacctgcatctccgacttcagcctccagcagctgcgggtgctagacctgagctgcaacagcatcgaggcctttcagacggcctcccagccccaggctgagttccagctcacctggcttgacctgcgggagaacaaactgctccatttccccgacctggccgcgctcccgagactcatctacctgaacttgtccaacaacctcatccggctccccacagggccaccccaggacagcaagggcatccacgcaccttccgagggctggtcagccctgcccctctcagcccccagcgggaatgccagcggccgccccctttcccagctcttgaatctggatttgagctacaatgagattgagctcatccccgacagctttcttgagcacctgacctccctgtgcttcctgaacctcagcagaaactgcttgcggacctttgaggcccggcgcttaggctccctgccctgcctgatgctccttgacttaagccacaatgccctggagacactggaactgggcgccagagccctggggtctctgcggacgctgctcctacagggcaatgccctgcgggacctgcccccatacacctttgccaatctggccagcctgcagcggctcaacctgcaggggaaccgagtcagcccctgtggggggccagatgagcctggcccctccggctgtgtggccttctccggcatcacctccctccgcagcctgagcctggtggataatgagatagagctgctcagggcaggggccttcctccacaccccactgactgagctggacctttcttccaatcctgggctggaggtggccacgggggccttgggaggcctggaggcctccttggaggtcctggcactgcagggcaacgggctgatggtcctgcaggtggacctgccctgcttcatctgcctcaagcggctcaatcttgccgagaaccgcctgagccaccttcccgcctggacacaggctgtgtcactggaggtgctggacctgcgaaacaacagcttcagcctcctgccaggcagtgccatgggtggcctggagaccagcctccggcgcctctacctgcaggggaatccactcagctgctgcggcaatggctggctggcagcccagctgcaccagggccgtgtggacgtggacgccacccaggacctgatctgccgcttcagctcccaggaggaggtgtccctgagccacgtgcgtcccgaggactgtgagaaggggggactgaagaacatcaacctcatcatcatcctcaccttcatactggtctctgccatcctcctcaccacgctggccgcctgctgctgcgtccgccggcagaagtttaaccaacagtataaagcctaaagaagccgggagacactctaggtcagtgggggagcctgaggtacagagaagagtgaggactgactcaaggtcacacagtgatccggatcccagaactctggtctccaaattacagcccaggacacctttctctgccgcctgctgcatcagtgggtgacccccttcccgggctgcactttgggtccagctgtggaagccagaagttgggcggtttcagggacagccgagaataatgttgacctgtcagatcaacaaatcttcactgagcatgtattttgtgccacaccctgctctgggcactgggaatgctgggaaatgagatacattcccgccctcaagaatctcccagtctggtaggagagagtgctgcagagccacgtggccgccacgcagtgtgcttagggcctgaggtgtgaaagcccagggctccagagctcggcaggccccgctggtttggtgcggtgagtcctgccccggctgtgcagggtgagggagggccaagccaggaggatttgtctgagacatttccaagcagactgtttgtcacgtcttctgagaatgactttcagtctctctgaaaatgaaaagcttaggaccggaagagagaattggagctgtacgagtgtgtctcggatctggtattgttaggtgggccacggcggctccagcagggtctggttaaggggtccagcccagcactggaccattccgtctcctgctctggacttgccctctcccttcctggcactctcatgttgcataccctgaccccagtgctgctctaagcaccgtccctgcccagccccacttctccatcgcagccccaccttggctgctgagccaggagctaaaaccttagatatctggttctgttttgcacccagcttggcagatgtggatttgaatccaagccttgtgtctgcccctatgtgacagctctatattttatccccgttttataaaagaggaaactgaagttctgaaaatctccttccagggccccagctaactaatgccataggtgagattcaaaccttcatccttctgtctccagggcctgatctttaccactgcaggggctgcaggccgttaagtggacaggaagtggccccacatagcccgagcagggtctggaagcatcctgtgctgtgcacacctgctctctcctctctcccaggcaggcagctgcaggcgctctcctccttctctgcctgtttccctcctcccttcctttccaccctggtgtgggttctcctgttctctctgtgctcttgcattctctcattcccttttcctctatggagcagagcctggagtttgagactatggaatccaacctccccattgcacagatggggaaactgaggcttaggaagagaatgaaacttgtggagagcttatacagaacctctgggggaaaaaagagcccttatttgtggggtgagattgggggttggaccagagtgatgtcctctctcagctatcacatcacaagataatgctggctccaaacttcctttctgtgcctcatcatgcaaggatcttttttccctcttacaaaaacaggtaaaaagcctcacccagatgacccccatccctcataccatggagtcatgagctgtctgggaagaatggacgtgctgggaccaactcaagaccttgttttgctgtcttcatcatcttacctgtgcttggcccacagtctggctcatgatgtgggctcagtaatgtgcgagaaagtgaaaatgccactctctccaccccattttacagaggagaacaccaaggcccagaggaagttaagggagagtcaatgggcagagccagggctaggccctggtggtgtgtggagcacccaggcagacccagtcctggttgggatcacacccacgggtgctactgcacgtaacactcctccttaggcctggaggccaaggtgtgggtccccacgcctgatctttgaaaacactacacagggctgctgtcacttcccagggcccaggcctcagcccaggcctcgggaccaactctttgtataacctacctgaatgtattaaaaactaattttggaaaaaaaaaa

SEQ ID NO: 145 - protein, 662 aa, Homo sapiens
MRPQILLLLALLTLGLAAQHQDKVPCKMVDKKVSCQVLGLLQVPSVLPPDTETLDLSGNQLRSILASPLGFYTALRHLDLSTNEISFLQPGAFQALTHLEHLSLAHNRLAMATALSAGGLGPLPRVTSLDLSGNSLYSGLLERLLGEAPSLHTLSLAENSLTRLTRHTFRDMPALEQLDLHSNVLMDIEDGAFEGLPRLTHLNLSRNSLTCISDFSLQQLRVLDLSCNSIEAFQTASQPQAEFQLTWLDLRENKLLHFPDLAALPRLIYLNLSNNLIRLPTGPPQDSKGIHAPSEGWSALPLSAPSGNASGRPLSQLLNLDLSYNEIELIPDSFLEHLTSLCFLNLSRNCLRTFEARRLGSLPCLMLLDLSHNALETLELGARALGSLRTLLLQGNALRDLPPYTFANLASLQRLNLQGNRVSPCGGPDEPGPSGCVAFSGITSLRSLSLVDNEIELLRAGAFLHTPLTELDLSSNPGLEVATGALGGLEASLEVLALQGNGLMVLQVDLPCFICLKRLNLAENRLSHLPAWTQAVSLEVLDLRNNSFSLLPGSAMGGLETSLRRLYLQGNPLSCCGNGWLAAQLHQGRVDVDATQDLICRFSSQEEVSLSHVRPEDCEKGGLKNINLIIILTFILVSAILLTTLAACCCVRRQKFNQQYKA

SEQ ID NO: 146 - DNA, 2975 bp, Homo sapiens
gaattttctgcaaggatcatatctaagtgcactttttgctgatacttcatttctagacattgagtctcactctaccccccaggctgaagtgcagtggtgtgatctcggttcactgcaacctccgcctccaggttcaagtgattctcgtacctcagcctcccgagtagctgggattacaggcgcctgccaccatgcctggctgatatttatatttttagtagagatggagtttcaccatgttggccaggctggtctcgaactctggacctcagatcttgtagaaaatttcagctgtagcccttggactagaagctgaaataacagaagctgtgtacgatgcattagggtattgaagaaaattaacttttgaattaaatatttggaatataaggaaataaggaaagttgactgaaaatggggcggaagaaaatacaaatcacacgcataatggatgaaaggaaccgacaggtcacttttacaaagagaaagtttggattaatgaagaaagcctatgaacttagtgtgctctgtgactgtgaaatagcactcatcattttcaacagctctaacaaactgtttcaatatgctagcactgatatggacaaagttcttctcaagtatacagaatataatgaacctcatgaaagcagaaccaactcggatattgttgaggctctgaacaagaaggaacacagagggtgcgacagcccagaccctgatacttcatatgtgctaactccacatacagaagaaaaatataaaaaaattaatgaggaatttgataatatgatgcggaatcataaaatcgcacctggtctgccacctcagaacttttcaatgtctgtcacagttccagtgaccagccccaatgctttgtcctacactaacccagggagttcactggtgtccccatctttggcagccagctcaacgttaacagattcaagcatgctctctccacctcaaaccacattacatagaaatgtgtctcctggagctcctcagagaccaccaagtactggcaatgcaggtgggatgttgagcactacagacctcacagtgccaaatggagctggaagcagtccagtggggaatggatttgtaaactcaagagcttctccaaatttgattggagctactggtgcaaatagcttaggcaaagtcatgcctacaaagtctccccctccaccaggtggtggtaatcttggaatgaacagtaggaaaccagatcttcgagttgtcatccccccttcaagcaagggcatgatgcctccactatcggaggaagaggaattggagttgaacacccaaaggatcagtagttctcaagccactcaacctcttgctaccccagtcgtgtctgtgacaaccccaagcttgcctccgcaaggacttgtgtactcagcaatgccgactgcctacaacactgattattcactgaccagcgctgacctgtcagcccttcaaggcttcaactcgccaggaatgctgtcgctgggacaggtgtcggcctggcagcagcaccacctaggacaagcagccctcagctctcttgttgctggagggcagttatctcagggttccaatttatccattaataccaaccaaaacatcagcatcaagtccgaaccgatttcacctcctcgggatcgtatgaccccatcgggcttccagcagcagcagcagcagcagcagcagcagcagccgccgccaccaccgcagccccagccacaacccccgcagccccagccccgacaggaaatggggcgctcccctgtggacagtctgagcagctctagtagctcctatgatggcagtgatcgggaggatccacggggcgacttccattctccaattgtgcttggccgacccccaaacactgaggacagagaaagcccttctgtaaagcgaatgaggatggacgcgtgggtgacctaaggcttccaagctgatgtttgtacttttgtgttactgcagtgacctgccctacatatctaaatcggtaaataaggacatgagttaaatatatttatatgtacatacatatatatatccctttacatatatatgtatgtgggtgtgagtgtgtgtgtatgtgtgggtgtgtgttacatacacagaatcaggcacttacctgcaaactccttgtaggtctgcagatgtgtgtcccatggcagacaaagcaccctgtaggcacagacaagtctggcacttccttggactacttgtttcgtaaagataaccagtttttgcagagaaacgtgtacccatatataattctcccacactagcttgcagaaacctagagggccccctacttgttttatttaactgtgcagtgactgtagttacttaagagaaaatgctttgtagaacagagcagtagaaaagcaggaaccaagaaagcaatactgtacataaaatgtcatttatattttccaacctggcatgggtgtctgttgcaaaggggtgcatgggaaagggctgttgatattaaaaacaaacaaaacaaaaaagccccacacataactgttttgcacgtgcaaaaatgtattgggtcaagaagtgatctttagctaataaagaaagagaatagaaaacacgcatgagatattcagaaaatactagcctagaaatatagagcattaacaaaggaaaattaatatattaagttataattggaatatgtcagaagtttctttttacattcatatcttaaaaattaaagaaactgattttagctcatgtatattttatatgaaagaaaacacccttatgaattgatgactatatataaaattatattcactacttttgaacacattctgctatgaattatttatataagccaaagctatatgttgtaacttttttttagagaatagctttatcttggtttaactctttagttttattttaagaggggaaaacaaaaatatcttgcaagcagaaccttgaaaaaaaaaaaggaattc

SEQ ID NO: 147 - protein, 507 aa, Homo sapiens
MGRKKIQITRIMDERNRQVTFTKRKFGLMKKAYELSVLCDCEIALIIFNSSNKLFQYASTDMDKVLLKYTEYNEPHESRTNSDIVEALNKKEHRGCDSPDPDTSYVLTPHTEEKYKKINEEFDNMMRNHKIAPGLPPQNFSMSVTVPVTSPNALSYTNPGSSLVSPSLAASSTLTDSSMLSPPQTTLHRNVSPGAPQRPPSTGNAGGMLSTTDLTVPNGAGSSPVGNGFVNSRASPNLIGATGANSLGKVMPTKSPPPPGGGNLGMNSRKPDLRVVIPPSSKGMMPPLSEEEELELNTQRISSSQATQPLATPVVSVTTPSLPPQGLVYSAMPTAYNTDYSLTSADLSALQGFNSPGMLSLGQVSAWQQHHLGQAALSSLVAGGQLSQGSNLSINTNQNISIKSEPISPPRDRMTPSGFQQQQQQQQQQQPPPPPQPQPQPPQPQPRQEMGRSPVDSLSSSSSSYDGSDREDPRGDFHSPIVLGRPPNTEDRESPSVKRMRMDAWVT

SEQ ID NO: 148 - DNA, 2412 bp, Homo sapiens
caggccaggactccacaaggctggtcccctgccctggagcaacttaaacaggccctctggccagcctggaaccctgagatggcctccagctcaggcagcagtcctcgcccggcccctgatgagaatgagtttccctttgggtgccctcccaccgtctgccaggacccaaaggagcccagggctctctgctgtgcaggctgtctctctgagaacccgaggaatggcgaggatcagatctgccccaaatgcagaggggaagacctccagtctataagcccaggaagccgtcttcgaactcaggagaaggctcaccccgaggtggctgaggctggaattgggtgcccctttgcaggtgtcggctgctccttcaagggaagcccacagtctgtgcaagagcatgaggtcacctcccagacctcccacctaaacctgctgttggggttcatgaaacagtggaaggcccggctgggctgtggcctggagtctgggcccatggccctggagcagaacctgtcagacctgcagctgcaggcagccgtggaagtggcgggggacctggaggtcgattgctaccgggcaccctgctccgagagccaggaggagctggccctgcagcacttcatgaaggagaagcttctggctgagctggaggggaagctgcgtgtgtttgagaacattgttgctgtcctcaacaaggaggtggaggcctcccacctggccctggccacctctatccaccagagccagctggaccgtgagcgcatcctgagcttggagcagagggtggtggagcttcagcagaccctggcccagaaagaccaggccctgggcaagctggagcagagcttgcgcctcatggaggaggcctccttcgatggcactttcctgtggaagatcaccaatgtcaccaggcggtgccatgagtcggcctgtggcaggaccgtcagcctcttctccccagccttctacactgccaagtatggctacaagttgtgcctgcggctgtacctgaatggagatggcactggaaagagaacccatctgtcgctcttcatcgtgatcatgagaggggagtatgatgcgctgctgccgtggcctttccggaacaaggtcaccttcatgctgctggaccagaacaaccgtgagcacgccattgacgccttccggcctgacctaagctcagcgtccttccagaggccccagagtgaaaccaacgtggccagtggatgcccactcttcttccccctcagcaaactgcagtcacccaagcacgcctacgtgaaggacgacacaatgttcctcaagtgcattgtggagaccagcacttagggtgggcggggctcctgagggagctccaactcagaagggagctagccagaggactgtgatgccctgcccttggcacccaagacctcagggcacaaagatgggtgaaggctggcatgatccaagcaagactgaggggtcgacttcgggctggccatctggttaggatggcaggacgtgggctgggcccacaaaggcaaagggtccagaaggagacaggcagagctgctcccctctgcacggaccatgcgacactgggaggccagtgagccactccggccccgaatgttgaggtggactctcaccaaatgagaagaaaatggaaccaggcttggaaccgtaggacccaagcagagaagctctcgggctaggaagatctctgcagggccgccagggagacctggacacaggcctgctctctttttctccagggtcagaaacaggaccgggtggaagggatggggtgccagtttgaatgcagtctgtccaggctcgtcattggaggtgaacaagcaaacccagagggctccactaggacttcaaattgggggttggatttgaagacttttaagtttccttccagcccagaaagtctctcattctaggcctcctggcccaggtgagtcctagagctacaggggttctggaaacattcaggagcttcctgtcctcccagctcctcactcaccttcagtaacccccactggactgacctggtccacagggcacctgccaccctgggcctggcagctcagcttccccaacacgcaggagcacacccagcccccacatcctgtgcctccatcagctaaacaccacgtcacttcatgcaggtgaaacccagtcactgtgagctcccaggtgcagccagaggcacctcaagaagaagaggggcataaactttcctcttcctgcctagaggccccacctttggtgctttccagaatcccgtaacacctgattaactgaggcatccacttctttcagcagactgatcaggacctccaagccactgagcaatgtataaccccaaagaaataatttttagaatctctttcgaagttttcctaaaaaaaaaaaaaaaaa

SEQ ID NO: 149 - protein, 416 aa, Homo sapiens
MASSSGSSPRPAPDENEFPFGCPPTVCQDPKEPRALCCAGCLSENPRNGEDQICPKCRGEDLQSISPGSRLRTQEKAHPEVAEAGIGCPFAGVGCSFKGSPQSVQEHEVTSQTSHLNLLLGFMKQWKARLGCGLESGPMALEQNLSDLQLQAAVEVAGDLEVDCYRAPCSESQEELALQHFMKEKLLAELEGKLRVFENIVAVLNKEVEASHLALATSIHQSQLDRERILSLEQRVVELQQTLAQKDQALGKLEQSLRLMEEASFDGTFLWKITNVTRRCHESACGRTVSLFSPAFYTAKYGYKLCLRLYLNGDGTGKRTHLSLFIVIMRGEYDALLPWPFRNKVTFMLLDQNNREHAIDAFRPDLSSASFQRPQSETNVASGCPLFFPLSKLQSPKHAYVKDDTMFLKCIVETST

SEQ ID NO: 150 - DNA, 2376 bp, Homo sapiens
cgcgcggcccctgtcctccggcccgagatgaatcctgcggcagaagccgagttcaacatcctcctggccaccgactcctacaaggttactcactataaacaatatccacccaacacaagcaaagtttattcctactttgaatgccgtgaaaagaagacagaaaactccaaattaaggaaggtgaaatatgaggaaacagtattttatgggttgcagtacattcttaataagtacttaaaaggtaaagtagtaaccaaagagaaaatccaggaagccaaagatgtctacaaagaacatttccaagatgatgtctttaatgaaaagggatggaactacattcttgagaagtatgatgggcatcttccaatagaaataaaagctgttcctgagggctttgtcattcccagaggaaatgttctcttcacggtggaaaacacagatccagagtgttactggcttacaaattggattgagactattcttgttcagtcctggtatccaatcacagtggccacaaattctagagagcagaagaaaatattggccaaatatttgttagaaacttctggtaacttagatggtctggaatacaagttacatgattttggctacagaggagtctcttcccaagagactgctggcataggagcatctgctcacttggttaacttcaaaggaacagatacagtagcaggacttgctctaattaaaaaatattatggaacgaaagatcctgttccaggctattctgttccagcagcagaacacagtaccataacagcttgggggaaagaccatgaaaaagatgcttttgaacatattgtaacacagttttcatcagtgcctgtatctgtggtcagcgatagctatgacatttataatgcgtgtgagaaaatatggggtgaagatctaagacatttaatagtatcgagaagtacacaggcaccactaataatcagacctgattctggaaaccctcttgacactgtgttaaaggttttggagattttaggtaagaagtttcctgttactgagaactcaaagggttacaagttgctgccaccttatcttagagttattcaaggggatggagtagatattaataccttacaagagattgtagaaggcatgaaacaaaaaatgtggagtattgaaaatattgccttcggttctggtggaggtttgctacagaagttgacaagagatctcttgaattgttccttcaagtgtagctatgttgtaactaatggccttgggattaacgtcttcaaggacccagttgctgatcccaacaaaaggtccaaaaagggccgattatctttacataggacgccagcagggaattttgttacactggaggaaggaaaaggagaccttgaggaatatggtcaggatcttctccatactgtcttcaagaatggcaaggtgacaaaaagctattcatttgatgaaataagaaaaaatgcacagctgaatattgaactggaagcagcacatcattaggctttatgactgggtgtgtgttgtgtgtatgtaatacataatgtttattgtacagatgtgtggggtttgtgttttatgatacattacagccaaattatttgttggtttatggacatactgccctttcattttttttcttttccagtgtttaggtgatctcaaattaggaaatgcatttaaccatgtaaaagatgagtgctaaagtaagctttttagggccctttgccaataggtagtcattcaatctggtattgatcttttcacaaataacagaactgagaaacttttatatataactgatgatcacataaaacagatttgcataaaattaccatgattgctttatgtttatatttaacttgtatttttgtacaaacaagattgtgtaagatatatttgaagtttcagtgatttaacagtctttccaacttttcatgatttttatgagcacagactttcaagaaaatacttgaaaataaattacattgccttttgtccattaatcagcaaataaaacatggccttaacaaagttgtttgtgttattgtacaatttgaaaattatgtcgggacataccctatagaattactaaccttactgccccttgtagaatatgtattaatcattctacattaaagaaaataatggttcttactggaatgtctaggcactgtacagttattatatatcttggttgttgtattgtaccagtgaaatgccaaatttgaaaggcctgtactgcaattttatatgtcagagattgcctgtggctctaatatgcacctcaagattttaaggagataatgtttttagagagaatttctgcttccactatagaatatatacataaatgtaaaatacttacaaaagtgg

SEQ ID NO: 151 - protein, 491 aa, Homo sapiens [sequence omitted]

SEQ ID NO: 152 - DNA, 1149 bp, Homo sapiens
ccgcagccatgaccccgcagcttctcctggcccttgtcctctgggccagctgcccgccctgcagtggaaggaaagggcccccagcagctctgacactgccccgggtgcaatgccgagcctctcggtacccgatcgccgtggattgctcctggaccctgccgcctgctccaaactccaccagccccgtgtccttcattgccacgtacaggctcggcatggctgcccggggccacagctggccctgcctgcagcagacgccaacgtccaccagctgcaccatcacggatgtccagctgttctccatggctccctacgtgctcaatgtcaccgccgtccacccctggggctccagcagcagcttcgtgcctttcataacagagcacatcatcaagcccgaccctccagaaggcgtgcgcctaagccccctcgctgagcgccagctacaggtgcagtgggagcctcccgggtcctggcccttcccagagatcttctcactgaagtactggatccgttacaagcgtcagggagctgcgcgcttccaccgggtggggcccattgaagccacgtccttcatcctcagggctgtgcggccccgagccaggtactacgtccaagtggcggctcaggacctcacagactacggggaactgagtgactggagtctccccgccactgccacaatgagcctgggcaagtagcaagggcttcccgctgcctccagacagcacctgggtcctcgccaccctaagccccgggacacctgttggagggcggatgggatctgcctagcctgggctggagtccttgctttgctgctgctgagctgccgggcaacctcagatgaccgacttttccctttgagcctcagtttctctagctgagaaatggagatgtactactctctcctttacctttacctttaccacagtgcagggctgactgaactgtcactgtgagatattttttattgtttaattagaaaagaattgttgttgggctgggcgcagtggatcgcacctgtaatcccagtcactgggaagccgacgtgggagggtagcttgaggccaggagctcgaaaccagtccgggccacacagcaagaccccatctctaaaaaattaatataaatataaaataaaaaaaaaaaaaa

SEQ ID NO: 153 - protein, 229 aa, Homo sapiens
MTPQLLLALVLWASCPPCSGRKGPPAALTLPRVQCRASRYPIAVDCSWTLPPAPNSTSPVSFIATYRLGMAARGHSWPCLQQTPTSTSCTITDVQLFSMAPYVLNVTAVHPWGSSSSFVPFITEHIIKPDPPEGVRLSPLAERQLQVQWEPPGSWPFPEIFSLKYWIRYKRQGAARFHRVGPIEATSFILRAVRPRARYYVQVAAQDLTDYGELSDWSLPATATMSLGK

SEQ ID NO: 154 - DNA, 2439 bp, Homo sapiens
gcagccgccaccgccgccgccgccgccaccagagccgccctgtccgcgccgcgcctcggcagccggaacagggccgccgtcggggagccccaacacacggtccacagctcatcatgatggacttggagctgccgccgccgggactcccgtcccagcaggacatggatttgattgacatactttggaggcaagatatagatcttggagtaagtcgagaagtatttgacttcagtcagcgacggaaagagtatgagctggaaaaacagaaaaaacttgaaaaggaaagacaagaacaactccaaaaggagcaagagaaagcctttttcgctcagttacaactagatgaagagacaggtgaatttctcccaattcagccagcccagcacatccagtcagaaaccagtggatctgccaactactcccaggttgcccacattcccaaatcagatgctttgtactttgatgactgcatgcagcttttggcgcagacattcccgtttgtagatgacaatgaggtttcttcggctacgtttcagtcacttgttcctgatattcccggtcacatcgagagcccagtcttcattgctactaatcaggctcagtcacctgaaacttctgttgctcaggtagcccctgttgatttagacggtatgcaacaggacattgagcaagtttgggaggagctattatccattcctgagttacagtgtcttaatattgaaaatgacaagctggttgagactaccatggttccaagtccagaagccaaactgacagaagttgacaattatcatttttactcatctataccctcaatggaaaaagaagtaggtaactgtagtccacattttcttaatgcttttgaggattccttcagcagcatcctctccacagaagaccccaaccagttgacagtgaactcattaaattcagatgccacagtcaacacagattttggtgatgaattttattctgctttcatagctgagcccagtatcagcaacagcatgccctcacctgctactttaagccattcactctctgaacttctaaatgggcccattgatgtttctgatctatcactttgcaaagctttcaaccaaaaccaccctgaaagcacagcagaattcaatgattctgactccggcatttcactaaacacaagtcccagtgtggcatcaccagaacactcagtggaatcttccagctatggagacacactacttggcctcagtgattctgaagtggaagagctagatagtgcccctggaagtgtcaaacagaatggtcctaaaacaccagtacattcttctggggatatggtacaacccttgtcaccatctcaggggcagagcactcacgtgcatgatgcccaatgtgagaacacaccagagaaagaattgcctgtaagtcctggtcatcggaaaaccccattcacaaaagacaaacattcaagccgcttggaggctcatctcacaagagatgaacttagggcaaaagctctccatatcccattccctgtagaaaaaatcattaacctccctgttgttgacttcaacgaaatgatgtccaaagagcagttcaatgaagctcaacttgcattaattcgggatatacgtaggaggggtaagaataaagtggctgctcagaattgcagaaaaagaaaactggaaaatatagtagaactagagcaagatttagatcatttgaaagatgaaaaagaaaaattgctcaaagaaaaaggagaaaatgacaaaagccttcacctactgaaaaaacaactcagcaccttatatctcgaagttttcagcatgctacgtgatgaagatggaaaaccttattctcctagtgaatactccctgcagcaaacaagagatggcaatgttttccttgttcccaaaagtaagaagccagatgttaagaaaaactagatttaggaggatttgaccttttctgagctagtttttttgtactattatactaaaagctcctactgtgatgtgaaatgctcatactttataagtaattctatgcaaaatcatagccaaaactagtatagaaaataatacgaaactttaaaaagcattggagtgtcagtatgttgaatcagtagtttcactttaactgtaaacaatttcttaggacaccatttgggctagtttctgtgtaagtgtaaatactacaaaaacttatttatactgttcttatgtcatttgttatattcatagatttatatgatgatatgacatctggctaaaaagaaattattgcaaaactaaccactatgtacttttttataaatactgtatggacaaaaaatggcattttttatattaaattgtttagctctggcaaaaaaaaaaaattttaagagctggtactaataaaggattattatgactgttaaaaaaaaaaaaaaaaaaaaaaaaaaaaaaaaaa

SEQ ID NO: 155 - protein, 605 aa, Homo sapiens
MMDLELPPPGLPSQQDMDLIDILWRQDIDLGVSREVFDFSQRRKEYELEKQKKLEKERQEQLQKEQEKAFFAQLQLDEETGEFLPIQPAQHIQSETSGSANYSQVAHIPKSDALYFDDCMQLLAQTFPFVDDNEVSSATFQSLVPDIPGHIESPVFIATNQAQSPETSVAQVAPVDLDGMQQDIEQVWEELLSIPELQCLNIENDKLVETTMVPSPEAKLTEVDNYHFYSSIPSMEKEVGNCSPHFLNAFEDSFSSILSTEDPNQLTVNSLNSDATVNTDFGDEFYSAFIAEPSISNSMPSPATLSHSLSELLNGPIDVSDLSLCKAFNQNHPESTAEFNDSDSGISLNTSPSVASPEHSVESSSYGDTLLGLSDSEVEELDSAPGSVKQNGPKTPVHSSGDMVQPLSPSQGQSTHVHDAQCENTPEKELPVSPGHRKTPFTKDKHSSRLEAHLTRDELRAKALHIPFPVEKIINLPVVDFNEMMSKEQFNEAQLALIRDIRRRGKNKVAAQNCRKRKLENIVELEQDLDHLKDEKEKLLKEKGENDKSLHLLKKQLSTLYLEVFSMLRDEDGKPYSPSEYSLQQTRDGNVFLVPKSKKPDVKKN

SEQ ID NO: 156 - DNA, 4426 bp, Homo sapiens
tgccttgaccaggacttgggactttgcgaaaggatcgcggggcccggagaggtgttggagagcacaatggctgaacaagtccttcctcaggctttgtatttgagcaatatgcggaaagctgtgaagatacgggagagaactccagaagacatttttaaacctactaatgggatcattcatcattttaaaaccatgcaccgatacacactggaaatgttcagaacttgccagttttgtcctcagtttcgggagatcatccacaaagccctcatcgacagaaacatccaggccaccctggaaagccagaagaaactcaactggtgtcgagaagtccggaagcttgtggcgctgaaaacgaacggtgacggcaattgcctcatgcatgccacttctcagtacatgtggggcgttcaggacacagacttggtactgaggaaggcgctgttcagcacgctcaaggaaacagacacacgcaactttaaattccgctggcaactggagtctctcaaatctcaggaatttgttgaaacggggctttgctatgatactcggaactggaatgatgaatgggacaatcttatcaaaatggcttccacagacacacccatggcccgaagtggacttcagtacaactcactggaagaaatacacatatttgtcctttgcaacatcctcagaaggccaatcattgtcatttcagacaaaatgctaagaagtttggaatcaggttccaatttcgcccctttgaaagtgggtggaatttacttgcctctccactggcctgcccaggaatgctacagataccccattgttctcggctatgacagccatcattttgtacccttggtgaccctgaaggacagtgggcctgaaatccgagctgttccacttgttaacagagaccggggaagatttgaagacttaaaagttcactttttgacagatcctgaaaatgagatgaaggagaagctcttaaaagagtacttaatggtgatagaaatccccgtccaaggctgggaccatggcacaactcatctcatcaatgccgcaaagttggatgaagctaacttaccaaaagaaatcaatctggtagatgattactttgaacttgttcagcatgagtacaagaaatggcaggaaaacagcgagcaggggaggagagaggggcacgcccagaatcccatggaaccttccgtgccccagctttctctcatggatgtaaaatgtgaaacgcccaactgccccttcttcatgtctgtgaacacccagcctttatgccatgagtgctcagagaggcggcaaaagaatcaaaacaaactcccaaagctgaactccaagccgggccctgaggggctccctggcatggcgctcggggcctctcggggagaagcctatgagcccttggcgtggaaccctgaggagtccactggggggcctcattcggccccaccgacagcacccagcccttttctgttcagtgagaccactgccatgaagtgcaggagccccggctgccccttcacactgaatgtgcagcacaacggattttgtgaacgttgccacaacgcccggcaacttcacgccagccacgccccagaccacacaaggcacttggatcccgggaagtgccaagcctgcctccaggatgttaccaggacatttaatgggatctgcagtacttgcttcaaaaggactacagcagaggcctcctccagcctcagcaccagcctccctccttcctgtcaccagcgttccaagtcagatccctcgcggctcgtccggagcccctccccgcattcttgccacagagctggaaacgacgcccctgctggctgcctgtctcaagctgcacggactcctggggacaggacggggacgagcaagtgcagaaaagccggctgcgtgtattttgggactccagaaaacaagggcttttgcacactgtgtttcatcgagtacagagaaaacaaacattttgctgctgcctcagggaaagtcagtcccacagcgtccaggttccagaacaccattccgtgcctggggagggaatgcggcacccttggaagcaccatgtttgaaggatactgccagaagtgtttcattgaagctcagaatcagagatttcatgaggccaaaaggacagaagagcaactgagatcgagccagcgcagagatgtgcctcgaaccacacaaagcacctcaaggcccaagtgcgcccgggcctcctgcaagaacatcctggcctgccgcagcgaggagctctgcatggagtgtcagcatcccaaccagaggatgggccctggggcccaccggggtgagcctgcccccgaagacccccccaagcagcgttgccgggcccccgcctgtgatcattttggcaatgccaagtgcaacggctactgcaacgaatgctttcagttcaagcagatgtatggctaaccggaaacaggtgggtcacctcctgcaagaagtggggcctcgagctgtcagtcatcatggtgctatcctctgaacccctcagctgccactgcaacagtgggcttaagggtgtctgagcaggagaggaaagataagctcttcgtggtgcccacgatgctcaggtttggtaacccgggagtgttcccaggtggccttagaaagcaaagcttgtaactggcaagggatgatgtcagattcagcccaaggttcctcctctcctaccaagcaggaggccaggaacttctttggacttggaaggtgtgcggggactggccgaggcccctgcaccctgcgcatcaggactgcttcatcgtcttggctgagaaagggaaaagacacacaagtcgcgtgggttggagaagccagagccattccacctcccctcccccagcatctctcagagatgtgaagccagatcctcatggcagcgaggccctctgcaagaagctcaaggaagctcagggaaaatggacgtattcagagagtgtttgtagttcatggtttttccctacctgcccggttcctttcctgaggacccggcagaaatgcagaaccatccatggactgtgattctgaggctgctgagactgaacatgttcacattgacagaaaaacaagctgctctttataatatgcaccttttaaaaaattagaatattttactgggaagacgtgtaactctttgggttattactgtctttacttctaaagaagttagcttgaactgaggagtaaaagtgtgtacatatataatatacccttacattatgtatgagggatttttttaaattatattgaaatgctgccctagaagtacaataggaaggctaaataataataacctgttttctggttgttgttggggcatgagcttgtgtatacactgcttgcataaactcaaccagctgcctttttaaagggagctctagtcctttttgtgtaattcactttatttattttattacaaacttcaagattatttaagtgaagatatttcttcagctctggggaaaatgccacagtgttctcctgagagaacatccttgctttgagtcaggctgtgggcaagttcctgaccacagggagtaaattggcctctttgatacacttttgcttgcctccccaggaaagaaggaattgcatccaaggtatacatacatattcatcgatgtttcgtgcttctccttatgaaactccagctatgtaataaaaaactatactctgtgttctgttaatgcctctgagtgtcctacctccttggagatgagatagggaaggagcagggatgagactggcaatggtcacagggaaagatgtggccttttgtgatggttttattttctgttaacactgtgtcctgggggggctgggaagtcccctgcatcccatggtaccctggtattgggacagcaaaagccagtaaccatgagtatgaggaaatctctttctgttgctggcttacagtttctctgtgtgctttgtggttgctgtcatatttgctctagaagaaaaaaaaaaaaggaggggaaatgcattttccccagagataaaggctgccattttgggggtctgtacttatggcctgaaaatatttgtgatccataactctacacagcctttactcatactattaggcacactttccccttagagccccctaagtttttcccagacgaatctttataatttcctttccaaagataccaaataaacttcagtgttttcatctaattctcttaaagttgatatcttaatattttgtgttgatcattatttccattcttaatgtgaaaaaaagtaattatttatacttattataaaaagtatttgaaatttgcacatttaattgtccctaatagaaagccacctattctttgttggatttcttcaagtttttctaaataaatgtaacttttcacaagagtcaacattaaaaaataaattattt

SEQ ID NO: 157 - protein, 790 aa, Homo sapiens
MAEQVLPQALYLSNMRKAVKIRERTPEDIFKPTNGIIHHFKTMHRYTLEMFRTCQFCPQFREIIHKALIDRNIQATLESQKKLNWCREVRKLVALKTNGDGNCLMHATSQYMWGVQDTDLVLRKALFSTLKETDTRNFKFRWQLESLKSQEFVETGLCYDTRNWNDEWDNLIKMASTDTPMARSGLQYNSLEEIHIFVLCNILRRPIIVISDKMLRSLESGSNFAPLKVGGIYLPLHWPAQECYRYPIVLGYDSHHFVPLVTLKDSGPEIRAVPLVNRDRGRFEDLKVHFLTDPENEMKEKLLKEYLMVIEIPVQGWDHGTTHLINAAKLDEANLPKEINLVDDYFELVQHEYKKWQENSEQGRREGHAQNPMEPSVPQLSLMDVKCETPNCPFFMSVNTQPLCHECSERRQKNQNKLPKLNSKPGPEGLPGMALGASRGEAYEPLAWNPEESTGGPHSAPPTAPSPFLFSETTAMKCRSPGCPFTLNVQHNGFCERCHNARQLHASHAPDHTRHLDPGKCQACLQDVTRTFNGICSTCFKRTTAEASSSLSTSLPPSCHQRSKSDPSRLVRSPSPHSCHRAGNDAPAGCLSQAARTPGDRTGTSKCRKAGCVYFGTPENKGFCTLCFIEYRENKHFAAASGKVSPTASRFQNTIPCLGRECGTLGSTMFEGYCQKCFIEAQNQRFHEAKRTEEQLRSSQRRDVPRTTQSTSRPKCARASCKNILACRSEELCMECQHPNQRMGPGAHRGEPAPEDPPKQRCRAPACDHFGNAKCNGYCNECFQFKQMYG

SEQ ID NO: 158 - DNA, 1550 bp, Homo sapiens
gtagtggtgccgacttcctgttgtttgaggccgggttgggggtgtgcgattgtgtgggacggtctggggcagcccagcagcggctgaccctctgcctgcggggaagggagtcgccaggcggccgtcatggcggtgtcggagagccagctcaagaaaatggtgtccaagtacaaatacagagacctaactgtacgtgaaactgtcaatgttattactctatacaaagatctcaaacctgttttggattcatatgtttttaacgatggcagttccagggaactaatgaacctcactggaacaatccctgtgccttatagaggtaatacatacaatattccaatatgcctatggctactggacacatacccatataatccccctatctgttttgttaagcctactagttcaatgactattaaaacaggaaagcatgttgatgcaaatgggaagatatatcttccttatctacatgaatggaaacacccacagtcagacttgttggggcttattcaggtcatgattgtggtatttggagatgaacctccagtcttctctcgtcctatttcggcatcctatccgccataccaggcaacggggccaccaaatacttcctacatgccaggcatgccaggtggaatctctccatacccatccggataccctcccaatcccagtggttacccaggctgtccttacccacctggtggtccatatcctgccacaacaagttctcagtacccttctcagcctcctgtgaccactgttggtcccagtagggatggcacaatcagcgaggacaccatccgagcctctctcatctctgcggtcagtgacaaactgagatggcggatgaaggaggaaatggatcgtgcccaggcagagctcaatgccttgaaacgaacagaagaagacctgaaaaagggtcaccagaaactggaagagatggttacccgtttagatcaagaagtagccgaggttgataaaaacatagaacttttgaaaaagaaggatgaagaactcagttctgctctggaaaaaatggaaaatcagtctgaaaacaatgatatcgatgaagttatcattcccacagctcccttatacaaacagatcctgaatctgtatgcagaagaaaacgctattgaagacactatcttttacttgggagaagccttgagaaggggcgtgatagacctggatgtcttcctgaagcatgtacgtcttctgtcccgtaaacagttccagctgagggcactaatgcaaaaagcaagaaagactgccggtctcagtgacctctactgacttctctgataccagctggaggttgagctcttcttaaagtattcttctcttccttttatcagtaggtgcccagaataagttattgcagtttatcattcaagtgtaaaatattttgaatcaataatatattttctgttttcttttggtaaagactggcttttattaatgcactttctatcctctgtaaactttttgtgctgaatgttgggactgctaaataaaatttgttgcataaaaaaaaaaaaaaaaaa

SEQ ID NO: 159 - protein, 390 aa, Homo sapiens
MAVSESQLKKMVSKYKYRDLTVRETVNVITLYKDLKPVLDSYVFNDGSSRELMNLTGTIPVPYRGNTYNIPICLWLLDTYPYNPPICFVKPTSSMTIKTGKHVDANGKIYLPYLHEWKHPQSDLLGLIQVMIVVFGDEPPVFSRPISASYPPYQATGPPNTSYMPGMPGGISPYPSGYPPNPSGYPGCPYPPGGPYPATTSSQYPSQPPVTTVGPSRDGTISEDTIRASLISAVSDKLRWRMKEEMDRAQAELNALKRTEEDLKKGHQKLEEMVTRLDQEVAEVDKNIELLKKKDEELSSALEKMENQSENNDIDEVIIPTAPLYKQILNLYAEENAIEDTIFYLGEALRRGVIDLDVFLKHVRLLSRKQFQLRALMQKARKTAGLSDLY

SEQ ID NO: 160 - DNA, 1073 bp, Homo sapiens
cggagccagcgtgggaggccgctgccgtcgcgcgccttggtttttctgttccttttttttttttttttttaacttcctgcctatcacacgcagccatcagcccacaaagacatgactaccaacgcgggccccttgcacccatactggcctcagcacctaagactggacaactttgtacctaatgaccgccccacctggcatatactggctggcctcttctctgtcacaggggtcttagtcgtgaccacatggctgttgtcaggtcgtgctgcggttgtcccattggggacttggcggcgactgtccctgtgctggtttgcagtgtgtgggttcattcacctggtgatcgagggctggttcgttctctactacgaagacctgcttggagaccaagccttcttatctcaactctggaaagagtatgccaagggagacagccgatacatcctgggtgacaacttcacagtgtgcatggaaaccatcacagcttgcctgtggggaccactcagcctgtgggtggtgatcgcctttctccgccagcatcccctccgcttcattctacagcttgtggtctctgtgggccagatctatggggatgtgctctacttcctgacagagcaccgcgacggattccagcacggagagctgggccaccctctctacttctggttttactttgtcttcatgaatgccctgtggctggtgctgcctggagtccttgtgcttgatgctgtgaagcacctcactcatgcccagagcacgctggatgccaaggccacaaaagccaagagcaagaagaactgaggagtggtggaccaggctcgaacactggccgaggaggagctctctgcctgccagaagagtctagtcctgctcccacagtttggagggacaaagctaattgatctgtcacactcaggctcatgggcaggcacaagaaggggaataaaggggctgtgtgaaggcactgctgggagccattagaacacagatacaagagaagccaggaggtctatgatggtgacgatttttaaaatcaggaaataaaagatcttgactctaaaaaaaaaaaa

SEQ ID NO: 161 - protein, 230 aa, Homo sapiens [sequence omitted]

SEQ ID NO: 162 - DNA, 1741 bp, Homo sapiens
ttggaacacctggcgagtcctcggtgtcggtggccggcagtcatctcgcggccgttcagaattataaggctgtctgcagagatttgaaaaatggcaacaaatgaaagtgtcagcatctttagttcagcatccttggctgtggaatatgtagattcacttttacctgagaatcctctgcaagaaccatttaaaaatgcttggaactatatgttgaataattatacaaagttccagattgcaacatggggatcccttatagttcatgaagccctttatttcttattctgtttacctggatttttatttcaatttataccttatatgaaaaaatacaaaattcaaaaggataagccagagacatgggaaaaccaatggaagtgtttcaaagttcttctctttaatcacttctgtatccagctgcctttgatttgtggaacctattattttacagagtatttcaatattccttatgattgggaaagaatgccaagatggtattttcttttggcaagatgctttggttgtgcagtcattgaagatacttggcactattttctgcatagactcttacaccacaaaagaatatacaagtatattcataaagttcatcatgagtttcaggctccatttggaatggaagctgaatatgcacatcctttggagactctaattcttggaactggatttttcattggaatcgtgcttttgtgtgatcatgtaattcttctttgggcatgggtgaccattcgtttattagaaactattgatgtccatagtggttatgatattcctctcaaccctttaaatctgatccctttctatgctggttctcggcatcatgatttccaccacatgaacttcattggaaactatgcttcaacatttacatggtgggatcgaatttttggaacagactctcagtataatgcctataatgaaaagaggaagaagtttgagaaaaagactgaataaatatctcacgtaaaccttcctgaaagataaacgttttcctgaattcagaaactagtagctaacattgcttctggagagcagaaataagcatgtcttctggctactaagtgataaaaagaacattaacaacctttaattaccttcctagtgggaactttttctactttacctacaagttctatatatgtagaaatgaataaatatatatttaagtacagttttcatgaggaagttttaaaagaccatgttcctaagcttccaagaaggttttggatactagaagtattaatctatggcttttctcccagtaaaaccataggcctgaagttcacattgggtctttaaatcttttagatatatactggtcatttcagaaaattcttcatagtggtattggccttatatttaactttttttttattttttttttgagacaaagccacactctgtctccttgtctggagtgtggtggcacagtctcagctcactgcaacctctgcctcccagttcaagcaattcttctgcctcagcctcccaagtagctgggattacaggcacccgccaccacgcccagctaatttttgtatttttgtagagatggggtttctcgatgttggccaggctggtctcaaacttctgacctcaagtgatctgcccaccttggcctcccaaagtgctgggattacaggtgtaagccactgcgcccggcctttttaactttaaacatgttttagaattcacctaaagatcaaaatatcatggattgaac

SEQ ID NO: 163 - protein, 293 aa, Homo sapiens
MATNESVSIFSSASLAVEYVDSLLPENPLQEPFKNAWNYMLNNYTKFQIATWGSLIVHEALYFLFCLPGFLFQFIPYMKKYKIQKDKPETWENQWKCFKVLLFNHFCIQLPLICGTYYFTEYFNIPYDWERMPRWYFLLARCFGCAVIEDTWHYFLHRLLHHKRIYKYIHKVHHEFQAPFGMEAEYAHPLETLILGTGFFIGIVLLCDHVILLWAWVTIRLLETIDVHSGYDIPLNPLNLIPFYAGSRHHDFHHMNFIGNYASTFTWWDRIFGTDSQYNAYNEKRKKFEKKTE

SEQ ID NO: 164 - DNA, 2697 bp, Homo sapiens
acgcgggcacgcacacacggaagcacgcctccacttaactcgcgccgccgcggcagctcgagtccaccagcagcgccgtccgcttgaccgagatgctgcgggcctgtcagttatcgggtgtgaccgccgccgcccagagttgtctctgtgggaagtttgtcctccgtccattgcgaccatgccgcagatactctacttcaggcagctctgggttgactactggcaaaattgctggagctggccttttgtttgttggtggaggtattggtggcactatcctatatgccaaatgggattcccatttccgggaaagtgtagagaaaaccataccttactcagacaaactcttcgagatggttcttggtcctgcagcttataatgttccattgccaaagaaatcgattcagtcgggtccactaaaaatctctagtgtatcagaagtaatgaaagaatctaaacagtctgcctcacaactccaaaaacaaaagggagatactccagcttcagcaacagcacctacagaagcggctcaaattatttctgcagcaggtgataccctgtcggtcccagcccctgcagttcagcctgaggaatctttaaaaactgatcaccctgaaattggtgaaggaaaacccacacctgcactttcagaagaagcatcctcatcttctataagggagcgaccacctgaagaagttgcagctcgccttgcacaacaggaaaaacaagaacaagttaaaattgagtctctagccaagagcttagaagatgctctgaggcaaactgcaagtgtcactctgcaggctattgcagctcagaatgctgcggtccaggctgtcaatgcacactccaacatattgaaagccgccatggacaattctgagattgcaggcgagaagaaatctgctcagtggcgcacagtggagggtgcattgaaggaacgcagaaaggcagtagatgaagctgccgatgcccttctcaaagccaaagaagagttagagaagatgaaaagtgtgattgaaaatgcaaagaaaaaagaggttgctggggccaagcctcatataactgctgcagagggtaaacttcacaacatgatagttgatctggataatgtggtcaaaaaggtccaagcagctcagtctgaggctaaggttgtatctcagtatcatgagctggtggtccaagctcgggatgactttaaacgagagctggacagtattactccagaagtccttcctggatggaaaggaatgagtgtttcagacttagctgacaagctctctactgatgatctgaactccctcattgctcatgcacatcgtcgtattgatcagctgaacagagagctggcagaacagaaggccaccgaaaagcagcacatcacgttagccttggagaaacaaaagctggaagaaaagcgggcatttgactctgcagtagcaaaagcattagaacatcacagaagtgaaatacaggctgaacaggacagaaagatagaagaagtcagagatgccatggaaaatgaaatgagaacccagcttcgccgacaggcagctgcccacactgatcacttgcgagatgtccttagggtacaagaacaggaattgaagtctgaatttgagcagaacctgtctgagaaactctctgaacaagaattacaatttcgtcgtctcagtcaagagcaagttgacaactttactctggatataaatactgcctatgccagactcagaggaatcgaacaggctgttcagagccatgcagttgctgaagaggaagccagaaaagcccaccaactctggctttcagtggaggcattaaagtacagcatgaagacctcatctgcagaaacacctactatcccgctgggtagtgcagttgaggccatcaaagccaactgttctgataatgaattcacccaagctttaaccgcagctatccctccagagtccctgacccgtggggtgtacagtgaagagacccttagagcccgtttctatgctgttcaaaaactggcccgaagggtagcaatgattgatgaaaccagaaatagcttgtaccagtacttcctctcctacctacagtccctgctcctattcccacctcagcaactgaagccgcccccagagctctgccctgaggatataaacacatttaaattactgtcatatgcttcctattgcattgagcatggtgatctggagctagcagcaaagtttgtcaatcagctgaagggggaatccagacgagtggcacaggactggctgaaggaagcccgaatgaccctagaaacgaaacagatagtggaaatcctgacagcatatgccagcgccgtaggaataggaaccactcaggtgcagccagagtgaggtttaggaagattttcataaagtcatatttcatgtcaaaggaaatcagcagtgatagatgaagggttcgcagcgagagtcccggacttgtctagaaatgagcaggtttacaagtactgttctaaatgttaacacctgttgcatttatattctttccatttgctatcatgtcagtgaacgccaggagtgctttctttgcaacttgtgtaacattttctgttttttcaggttttactgatgaggcttgtgaggccaatcaaaataatgtttgtgatctctactactgttgattttgccctcggagcaaactgaataaagcaacaagatg

SEQ ID NO: 165 - protein, 758 aa, Homo sapiens
MLRACQLSGVTAAAQSCLCGKFVLRPLRPCRRYSTSGSSGLTTGKIAGAGLLFVGGGIGGTILYAKWDSHFRESVEKTIPYSDKLFEMVLGPAAYNVPLPKKSIQSGPLKISSVSEVMKESKQSASQLQKQKGDTPASATAPTEAAQIISAAGDTLSVPAPAVQPEESLKTDHPEIGEGKPTPALSEEASSSSIRERPPEEVAARLAQQEKQEQVKIESLAKSLEDALRQTASVTLQAIAAQNAAVQAVNAHSNILKAAMDNSEIAGEKKSAQWRTVEGALKERRKAVDEAADALLKAKEELEKMKSVIENAKKKEVAGAKPHITAAEGKLHNMIVDLDNVVKKVQAAQSEAKVVSQYHELVVQARDDFKRELDSITPEVLPGWKGMSVSDLADKLSTDDLNSLIAHAHRRIDQLNRELAEQKATEKQHITLALEKQKLEEKRAFDSAVAKALEHHRSEIQAEQDRKIEEVRDAMENEMRTQLRRQAAAHTDHLRDVLRVQEQELKSEFEQNLSEKLSEQELQFRRLSQEQVDNFTLDINTAYARLRGIEQAVQSHAVAEEEARKAHQLWLSVEALKYSMKTSSAETPTIPLGSAVEAIKANCSDNEFTQALTAAIPPESLTRGVYSEETLRARFYAVQKLARRVAMIDETRNSLYQYFLSYLQSLLLFPPQQLKPPPELCPEDINTFKLLSYASYCIEHGDLELAAKFVNQLKGESRRVAQDWLKEARMTLETKQIVEILTAYASAVGIGTTQVQPE

SEQ ID NO: 166 - DNA, 3915 bp, Homo sapiens
gtggggtggggtggggctgggggcttgtcgccctttcaggctccaccctttgcggagattataaatagtcatgatcccagcgagacccagagatgcctgtaatggtgagactttggatccttcctgaggacgtggagaaaactttctgctgagaaggacattttgaaggttttgttggctgaaaaagctgtttctggaatcacccctagatctttcttgaagacttgaattagattacagcgatggggacacagaaggtcaccccagctctgatatttgccatcacagttgctacaatcggctctttccaatttggctacaacactggggtcatcaatgctcctgagaagatcataaaggaatttatcaataaaactttgacggacaagggaaatgccccaccctctgaggtgctgctcacgtctctctggtccttgtctgtggccatattttccgtcgggggtatgatcggctccttttccgtcggactcttcgtcaaccgctttggcaggcgcaattcaatgctgattgtcaacctgttggctgtcactggtggctgctttatgggactgtgtaaagtagctaagtcggttgaaatgctgatcctgggtcgcttggttattggcctcttctgcggactctgcacaggttttgtgcccatgtacattggagagatctcgcctactgccctgcggggtgcctttggcactctcaaccagctgggcatcgttgttggaattctggtggcccagatctttggtctggaattcatccttgggtctgaagagctatggccgctgctactgggttttaccatccttcctgctatcctacaaagtgcagcccttccattttgccctgaaagtcccagatttttgctcattaacagaaaagaagaggagaatgctaagcagatcctccagcggttgtggggcacccaggatgtatcccaagacatccaggagatgaaagatgagagtgcaaggatgtcacaagaaaagcaagtcaccgtgctagagctctttagagtgtccagctaccgacagcccatcatcatttccattgtgctccagctctctcagcagctctctgggatcaatgctgtgttctattactcaacaggaatcttcaaggatgcaggtgttcaagagcccatctatgccaccatcggcgcgggtgtggttaatactatcttcactgtagtttctctatttctggtggaaagggcaggaagaaggactctgcatatgataggccttggagggatggctttttgttccacgctcatgactgtttctttgttattaaaggataactataatgggatgagctttgtctgtattggggctatcttggtctttgtagccttctttgaaattggaccaggccccattccctggtttattgtggccgaactcttcagccagggcccccgcccagctgcgatggcagtggccggctgctccaactggacctccaacttcctagtcggattgctcttcccctccgctgctcactatttaggagcctacgtttttattatcttcaccggcttcctcattaccttcttggcttttaccttcttcaaagtccctgagacccgtggcaggacttttgaggatatcacacgggcctttgaagggcaggcacacggtgcagatagatctggaaaggacggcgtcatggagatgaacagcatcgagcctgctaaggagaccaccaccaatgtctaagtcgtgcctccttccacctccctcccggcatgggaaagccacctctccctcaacaagggagagacctcatcaggatgaacccaggacgcttctgaatgctgctacttaattcctttctcatcccacgcactccatgagcaccccaaggctgcggtttgttggatcttcaatggctttttaaattttatttcctggacatcctcttctgcttaggagagaccgagtgaacctaccttcatttcaggagggattggccgcttggcacatgacaactttgccagcttttcctcccttgggttctgatattgccgcactaggggatataggagaggaaaagtaaggtgcagttcccccaacctcagacttaccaggaagcagatacatatgagtgtggaagccggagggtgtttatgtaagagcaccttcctcacttccatacagctctacgtggcaaattaacttgagttttatttattttatcctctggtttaattacataatttttttttttttactttaagtttcaggatacatgtgccgaatgtgcaggtttgttacataggtatatatatgccatgatggaaatatttatttttttaagcgtaattttgccaaataataaaaacagaaggaaattgagattagagggaggtgtttaaagagaggttatagagtagaagatttgatgctggagaggttaaggtgcaataagaatttagggagaaatgttgttcattattggagggtaaatgatgtggtgcctgaggtctgtacgttacctcttaacaatttctgtccttcagatggaaactctttaacttctcgtaaaagtcatatacctatataataaagctactgatttccttggagcttttttctttaagataatagtttacatgtagtagtacttgaaatctaggattattaactaatatgggcattgtagttaatgatggttgatgggttctaattttggatggagtccagggaagagaaagtgatttctagaaagcctgttcccctcactggatgaaataactccttcttgtagtagtctcattacttttgaagtaatcccgccacctatctcgtgggagagccatccaaataagaaacctaaaataattggttcttggtagagattcattatttttccactttgttctttaggagattttaggtgttgattttctgttgtattttaactcatacctttaaaggaattccccaaagaatgtttatagcaaacttggaatttgtaacctcagctctgggagaggatttttttctgagcgattattatctaaagtgtgttgttgctttaggctcacggcacgcttgcgtatgtctgttaccatgtcactgtggtcctatgccgaatgccctcaggggacttgaatctttccaataaaccaggtttagacagtatgagtcaatgtgcagtgtagcccacacttgagaggatgaatgtatgtgcactgtcactttgctctgggtggaagtacgttattgttgacttattttctctgtgtttgttcctacagcccctttttcatatgttgctcagtctccctttcccttcttggtgcttacacatctcagaccctttagccaaacccttgtcagtgacagtattttggttcttagttctcactgttccctctgctcctggagcctttgaataaaaatgcacgtagctgaggccggatgcggtggctcacgcctgtaatcccagcactttgggaggcctaggcgggcggtcaggggttcgagaccagtctggccaacatcgtgaaaccctgtctctactaaaaatgcaaaaattagccgggcgtggtggcgggcgcctgtaatcccagctacttgggaagctgaggcgggagaatcatgtgaacccgggacgcaggggttgcagtgagcggagatcgcatcattgcactctagcctgggccacagggcgagactccgtctcaaaaaaaaaaaaatgcacatagctatcgagtgtgctttagcttgaaaaggtgaccttgcaacttcatgtcaactttctggctcctcaaacagtaggttggcagtaaggcagggtcccatttctcactgagaagattgtgaatatttccatatggattttctattgttactctggttctttgttttaaaataaaaattctgaatgtacacg

SEQ ID NO: 167 - protein, 496 aa, Homo sapiens
MGTQKVTPALIFAITVATIGSFQFGYNTGVINAPEKIIKEFINKTLTDKGNAPPSEVLLTSLWSLSVAIFSVGGMIGSFSVGLFVNRFGRRNSMLIVNLLAVTGGCFMGLCKVAKSVEMLILGRLVIGLFCGLCTGFVPMYIGEISPTALRGAFGTLNQLGIVVGILVAQIFGLEFILGSEELWPLLLGFTILPAILQSAALPFCPESPRFLLINRKEEENAKQILQRLWGTQDVSQDIQEMKDESARMSQEKQVTVLELFRVSSYRQPIIISIVLQLSQQLSGINAVFYYSTGIFKDAGVQEPIYATIGAGVVNTIFTVVSLFLVERAGRRTLHMIGLGGMAFCSTLMTVSLLLKDNYNGMSFVCIGAILVFVAFFEIGPGPIPWFIVAELFSQGPRPAAMAVAGCSNWTSNFLVGLLFPSAAHYLGAYVFIIFTGFLITFLAFTFFKVPETRGRTFEDITRAFEGQAHGADRSGKDGVMEMNSIEPAKETTTNV

SEQ ID NO: 168 - DNA, 4404 bp, Homo sapiens
actcggccggcagcggaccgcagccaccagccgcccgcgccctccagccccgtccgggagtccccggcccgctgcggtgccgtgagtacctccaaccccctgcgccccggaggaggccgaggggcttagccaccagggctcggaagtgggggccgaatccggtgcgagacccaaggagaggggagcagagccggagttggggagactgtggctgaaaactgtgtcttcctggagactaggctggcattttgactttggggttgctgaaaagccaggagtcaaaatgactgagcgctttgactgccaccattgcaacgaatctctctttggcaagaggtacatcctgcgggaggagagcccctactgcgtggtgtgctttgagaccctgttcgccaacacctgcgaggagtgtgggaagcccatcggctgtgactgcaaggtgcaacattagaggaaatcaatcagcactgggactggctggaacaaaatctcctccacaccttgtctgtctttgataataaagatgacattgccagttttgtcaaagggaaggtaaagccgtgtgtctgggtggctgacggatgacacagctgagccattctcctcatcaggtgtgactgtcgttgaagcagcgcacacttctcgggggcctgtgcacctcagtccctcctgcttcctgtcccttgcaccccctgccttcccattgctggctcactgagcagggactgtcatctctgtgtgtcaggctctgatagccgaggagaccagcagcaggctcgccgagcaggaggaggaacccgagaaattccgagaagccctggtgaagttcgaggccaggttcaacttccccgaggcggagaagctggtcacctactactcctgctgctgttggaagggcagggtgccccgccagggctggctgtacctcagcatcaaccacctctgcttctactccttcttcctgggcaaggaacttaaacttgtggttccgtgggttgatatccagaaattagaaagaacgtccaatgtctttctgacggataccatccgaatcaccacgcagaataaggagcgtgacttctccatgttcctgaacctggatgaggtgtttaaggtcatggagcagctggccgacgtgacgctgcgaaggctgctggataatgaggtctttgacctcgaccccgatctgcaggagccgagccagatcaccaagagggacctggaagccagagcacagaatgagttcttccgggctttcttcaggttgccgaggaaggagaagctgcacgcggttgtggactgttcgctctggacgccgttcagtcgctgtcacaccgcggggcggatgttcgcctctgacagctacatctgctttgccagcagagaagatggctgctgtaagatcatcctgccactcagagaggtggtgagcatcgagaagatggaggacacgagcctgctgccgcatcccatcattgtcagtatcagaagcaaggtggccttccagttcattgagctccgggaccgagacagcctggtggaggcgctgcttgcgaggttgaagcaggtccacgccaaccaccccgtgcactacgacacctctgcggatgatgacatggcttcactcgtgtttcattcaacaagcatgtgcagtgaccacagatttggggatcttgaaatgatgtcttctcaaaatagcgaggagagtgagaaagagaagagcccgctgatgcaccccgatgccctggtcaccgccttccagcagtcaggcagccagagccctgactcccgaatgtccagagaacagataaaaataagcctgtggaatgaccactttgtggaatacggcagaaccgtgtgtatgtttcgcacagagaagattcggaagctcgtagccatgggcatccctgaatctttgcgagggagactctggcttctcttctcagatgcggtgacggatcttgcctcacaccctggttactacgggaatctggtggaggagtccctggggaaatgctgcctggtaaccgaggagatagaacgagacctgcaccgctccctgccagagcaccccgccttccagaacgaaacgggaattgctgctttgaggagagtcttgacggcctatgcccaccggaaccccaagattggatactgccagtccatgaacatcctgacctccgtgctgctgctgtacaccaaggaggaggaagccttctggctgttggttgctgtgtgtgagcggatgctgcccgattacttcaaccaccgagtgatcggggcacaagttgaccagtctgtcttcgaggagctcatcaagggtcatctcccagagctggcagagcacatgaacgacctctcagccctggcgtctgtctctctctcgtggttcctgaccctgttcctcagcatcatgcctctagagagtgcggtgaatgtggtagactgcttcttctatgatggcatcaaagccatcttccagctgggactggctgtgcttgaggccaatgctgaggacctgtgcagcagcaaggatgatggccaggccttgatgatcctcagcaggtttctagatcacattaagaatgaggacagcccagggcccccagttggcagccaccatgcctttttctccgacgaccaggagccctaccctgtgactgatatttcggacctgatccgggattcctatgagaaatttggagaccagtctgtggagcagatcgagcacctacgttacaagcacaggatcagggtcctccaaggccacgaggacaccacaaagcagaacgtgcttcgagtcgttatcccggaagtctcaattcttcctgaagacctagaggagctctacgacttattcaagagagaacatatgatgagctgttactgggagcagcccaggcccatggcctcacgccacgaccccagccggccctatgctgagcagtaccgcatagacgcccggcagtttgcacacctgtttcagctagtctcgccctggacctgcggggcccacacggagatcctcgccgaaaggacgttcaggctcttggatgacaacatggaccagctcatcgagttcaaagcgtttgtgagctgcctcgatattatgtataatggagaaatgaatgagaagattaaactattatacaggcttcatatccctccagcactcactgaaaatgaccgagacagccagtcgccgttgaggaatcctctgttgtcaacatcgagacccctggttttcgggaaacccaatggtgatgcagttgattatcagaaacagctgaagcagatgattaaggatttagccaaagaaaaagataaaactgagaaagaattgcccaaaatgagccagagagaatttatccagttctgtaaaactctgtacagtatgttccatgaagatccagaagaaaatgatttgtatcaagccatcgccacagtcaccacactgctgctgcagatcggggaggtggggcagcgaggcagcagctctggaagctgctcccaggagtgtggggaggagctgcgggcttcagctccttctcctgaggactcggtttttgcagacactgggaagacgccccaggactcccaggcacttccagaggcggcagaaagggactggactgtctcccttgaacatattttagcttcacttctgactgaacagtcattagtcaacttttttgaaaagccactggacatgaaatccaaacttgaaaatgccaagatcaatcagtacaatctcaaaacttttgaaatgagccaccaatcacaatctgaacttaagctgagtaacttgtagcaagacagcagctgctatgcacactggagtccaccataccaaagcacgaaccagactgtttcttggggtcagccctaaaccgagatttcagtctaccttaccaatggggcatctggctaaacaacctgacaaactgtggccaggggaaccgacacaaccctcaagcatttctatgtattgagaattgtcagtgccctaaggtatccattggttcccttgatgccaacttacaatttttaccggatttgctgaaatgggcacttctgctgtgatgctagtgttgattttgctctcagatgaacacaatgtctcatactaaccaagaagcaagaaaagccccatgctttcatttttcacttggagtgacaatgggagaggtcaggaatcaagttcactttcaagatctaagggagtccactatctgtgcaattgtatttggcttttttttgcactgtttcaatgctggtaattgaaaccattttaatatatttggttgtattcactttatatgtccttccaaaaatgttgttgtgtacataccatgctttcaatgttggcttccaagttttttaataagaaactttttgtttttt

SEQ ID NO: 169 - protein, 897 aa, Homo sapiens
MEQLADVTLRRLLDNEVFDLDPDLQEPSQITKRDLEARAQNEFFRAFFRLPRKEKLHAVVDCSLWTPFSRCHTAGRMFASDSYICFASREDGCCKIILPLREVVSIEKMEDTSLLPHPIIVSIRSKVAFQFIELRDRDSLVEALLARLKQVHANHPVHYDTSADDDMASLVFHSTSMCSDHRFGDLEMMSSQNSEESEKEKSPLMHPDALVTAFQQSGSQSPDSRMSREQIKISLWNDHFVEYGRTVCMFRTEKIRKLVAMGIPESLRGRLWLLFSDAVTDLASHPGYYGNLVEESLGKCCLVTEEIERDLHRSLPEHPAFQNETGIAALRRVLTAYAHRNPKIGYCQSMNILTSVLLLYTKEEEAFWLLVAVCERMLPDYFNHRVIGAQVDQSVFEELIKGHLPELAEHMNDLSALASVSLSWFLTLFLSIMPLESAVNVVDCFFYDGIKAIFQLGLAVLEANAEDLCSSKDDGQALMILSRFLDHIKNEDSPGPPVGSHHAFFSDDQEPYPVTDISDLIRDSYEKFGDQSVEQIEHLRYKHRIRVLQGHEDTTKQNVLRVVIPEVSILPEDLEELYDLFKREHMMSCYWEQPRPMASRHDPSRPYAEQYRIDARQFAHLFQLVSPWTCGAHTEILAERTFRLLDDNMDQLIEFKAFVSCLDIMYNGEMNEKIKLLYRLHIPPALTENDRDSQSPLRNPLLSTSRPLVFGKPNGDAVDYQKQLKQMIKDLAKEKDKTEKELPKMSQREFIQFCKTLYSMFHEDPEENDLYQAIATVTTLLLQIGEVGQRGSSSGSCSQECGEELRASAPSPEDSVFADTGKTPQDSQALPEAAERDWTVSLEHILASLLTEQSLVNFFEKPLDMKSKLENAKINQYNLKTFEMSHQSQSELKLSNL

SEQ ID NO: 170 - DNA, 2274 bp, Homo sapiens
cggctgctgctgccactgctgtgctgggggcccggtcgccaggcaaaaagccctccacgtttgaggggagtcatgagccgtttcctgaatgtgttaagaagttggctggttatggtgtccatcatagccatggggaacacgctgcagagcttccgagaccacacttttctctatgaaaagctctacactggcaagccaaaccttgtgaatggcctccaagctcggacctttgggatctggacgctgctctcatcagtgattcgctgcctctgtgccattgacattcacaacaagacgctctatcacatcacactctggaccttcctccttgccctggggcatttcctctctgagttgtttgtctatggaactgcagctcccacgattggcgtcctggcacccctgatggtggcaagtttctccatcctgggtatgctggtcgggctccggtatctagaagtagaaccagtatccagacagaagaagagaaactgaggccagcattatcacctccaggactttctcgttttccaccttggccatcttcttccttcgtcgtctctcctctttaatttcttttctattccatcatctgcccttttattcacttttagcctctttttttaatttttaaaatttaaagatatgcatactgaaaagtatataacatgtacgtacaatttaaagaataattttaaagtgaatactacgtaactccatccaagtcaagaaattgccagcttctcggaagcccactgtgtctccttcccctacctgcaacctcttccaggctcccttttccagccttcccctttttcccttttattttcatgccttgatttgacttgtgtggtgggaacatgtgaactatgaaacttaaacctgctgcccacccagagcagctgtgaccaagggctgcctcaaggggttgtccacgcaggttgggctcctctctgctgctggacccaagactctgaaccttccaagggacaggcagttcttctaagaagggctcccctgtgtgtgagcaagaccacagctctccttctatctacagatgcatgagggttggaagagtctgggctgtttttagaccttctggtcagctgtatttgtgtaacaacttttgtaataaatagaaaaaccctctgctctgatcagttcttgtactttgacctctgctaagacaagagcatggctgcctcctctgagccctaggagaatcacagctttatgcctgattgaatacaccatagtgagtaggacagctcatgacacaggtcagcctggctgcctccggctccttactgtcatttgctcattcctcttgtattcttgaagtcaaatcttcttttttctcaccttcaagagtctgcgttcacaactaaacactaagtgccctttcttatttcctcctaaagaagaaacagattcttgagagagcagagacaaaaaaatagaactaggcagcatagatgaaacaactgcatgacatgggaagaagacaactaaaccccgaggagaatgcactggaatggacagttgctcttaaaccctacccagagggcctcccccagctggaccctcatacacagtgtgtgtatccaaaaggccattgctatttcagcaaatatttgttgagtacttctccatgccggacacttgggaaagagaaatgaacgacacaggcaatgcccctgccctgtgggccttatattatagtcaaggtaacagaatcaacaagccaacacaaaaataaagaacttcaaatagggataagaactctaacaaacacaaggtattttggtcaagaaggaatgtggggtgggcagtggggaacgtaacttaaattagatcatcagaaagtcctccctgaggagatggatttttttttgtttttttagagacggggtttcactctgtcacccaggctgggaattgcagtggcacaatccctcactgctgcctcaacttcctgggctcaagtgaccctcctgcatcagcttcccaagtagctgggactgcaagtgtgtaccaccacatccagctaacatttttgggggtgggaagagatggggtcttactatgttgtccaggctaagaggtgggatttgagctgagacttgaatgcccaggagttaaatgtcttaagatatggagcaggccgttagaaaggagggagcagcaactggaaggtagaatagtcttattcaaggaataagaactatgtaatcacagcatggtgaagagttaggaagtgaaaaaaaaaaaaaa

SEQ ID NO: 171 - protein, 140 aa, Homo sapiens
MSRFLNVLRSWLVMVSIIAMGNTLQSFRDHTFLYEKLYTGKPNLVNGLQARTFGIWTLLSSVIRCLCAIDIHNKTLYHITLWTFLLALGHFLSELFVYGTAAPTIGVLAPLMVASFSILGMLVGLRYLEVEPVSRQKKRN

SEQ ID NO: 172 - DNA, 1770 bp, Homo sapiens
gaggagtggattacatattccaacagttgttattacattggtaaggaaagaagaacttgggaagaaagagtttgctggcctgtgcttcgaagaactctgatctgctttctatagataatgaggaagaaatggtatgtgtggggacttcccagttggctgtaagttgccatttgaactaaacgaaatagatcaggaactgaggacatatctaaattttctagttttatagaaggcttttatccacaagaatcaagatcttccctctctgagcaggaatcctttgtgcattgaagactttagattcctctctgcggtagacgtgcacttataagtatttgatggggtggattcgtggtcggaggtctcgacacagctgggagatgagtgaatttcataattataacttggatctgaagaagagtgatttttcaacacgatggcaaaagcaaagatgtccagtagtcaaaagcaaatgtagagaaaatgcatctccattttttttctgctgcttcatcgctgtagccatgggaatccgtttcattattatggtagcaatatggagtgctgtattcctaaactcattattcaaccaagaagttcaaattcccttgaccgaaagttactgtggcccatgtcctaaaaactggatatgttacaaaaataactgctaccaattttttgatgagagtaaaaactggtatgagagccaggcttcttgtatgtctcaaaatgccagccttctgaaagtatacagcaaagaggaccaggatttacttaaactggtgaagtcatatcattggatgggactagtacacattccaacaaatggatcttggcagtgggaagatggctccattctctcacccaacctactaacaataattgaaatgcagaagggagactgtgcactctatgcctcgagctttaaaggctatatagaaaactgttcaactccaaatacatacatctgcatgcaaaggactgtgtaaagatgatcaaccatctcaataaaagccaggaacagagaagagattacaccagcggtaacactgccaaccgagactaaaggaaacaaacaaaaacaggacaaaatgaccaaagactgtcagatttcttagactccacaggaccaaaccatagaacaatttcactgcaaacatgcatgattctccaagacaaaagaagagagatcctaaaggcaattcagatatccccaaggctgcctctcccaccacaagcccagagtggatgggctgggggaggggtgctgttttaatttctaaaggtaggaccaacacccaggggatcagtgaaggaagagaaggccagcagatcagtgagagtgcaaccccaccctccacaggaaattgcctcatgggcagggccacagcagagagacacagcatgggcagtgccttccctgcctgtgggggtcatgctgccacttttaatgggtcctccacccaacggggtcagggaggtggtgctgccccagtgggccatgattatcttaaaggcattattctccagccttaagatcttaggacgtttcctttgctatgatttgtacttgcttgagtcccatgactgtttctcttcctctctttcttccttttggaatagtaatatccatcctatgtttgtcccactattgtattttggaagcacataacttgtttggtttcacaggttcacagttaagaaggaattttgcctctgaataaatagaatcttgagtctcatgcaaaaaaaaaaaaaaaaaaaaaaaaa

SEQ ID NO: 173 - protein, 216 aa, Homo sapiens
MGWIRGRRSRHSWEMSEFHNYNLDLKKSDFSTRWQKQRCPVVKSKCRENASPFFFCCFIAVAMGIRFIIMVAIWSAVFLNSLFNQEVQIPLTESYCGPCPKNWICYKNNCYQFFDESKNWYESQASCMSQNASLLKVYSKEDQDLLKLVKSYHWMGLVHIPTNGSWQWEDGSILSPNLLTIIEMQKGDCALYASSFKGYIENCSTPNTYICMQRTV

SEQ ID NO: 174 - DNA, 3690 bp, Homo sapiens
gggccggggtgcggagggagtccctgaaacttctcccaacagccccagggccaatcttccctcagcccactcccctcttcgccagctcccaggtccccactcctgtaccgggggtggggtggggagccaggcccgtctcccgctgggacacacacaggggccggggagcggggacgggacccccgaggcgggggggacgaaccgacagacagacggctgggcgcccgccccagcgggcaggcaggcaggaggaggcggaggcgggggtacgacggggagcactgggtctggggagtttcctctcaactatcgggggagaaactccccgcagccggaggaaagacccagacagtgttttcctcccgggggccgtgctcccccgccccgcgtagcggcggtcgccgccaccggcgcctccacctctaccatctcctctttctccaccacctcgggccccggtgtccccggccagcactatgcccatcttactgttcctgatagacacgtctgcctctatgaaccagcgcagccatctgggcaccacctacctggacacggccaaaggcgcggtagagaccttcatgaagctccgtgcccgggaccctgccagcagaggagacaggtatatgctggtcactttcgaagagccgccctatgctatcaaggctggatggaaagaaaaccatgcaacgtttatgaatgaattgaaaaaccttcaggctgaaggacttacgactcttggccaatccctaaggacagcttttgatttattaaatttaaatagattagtaactggcatagacaactatgggcagggaagaaacccttttttcttggagccagcaataattatcacaattactgatgggagcaagttgactaccaccagtggagtccaggatgagcttcatttacctcttaattctcctttgcctggaagtgaattgaccaaggaaccttttcgttgggatcagagactctttgcattagtgttgcggttgcctggcaccatgtcagtagaatcagaacagttgacaggtgtgcctttagatgactctgcaatcacaccaatgtgtgaagtgacaggcggccgttcatattctgtgtgttctccaagaatgcttaatcagtgtctggagtccttggtgcagaaagtacaaagtggggtggtaataaactttgaaaaagcaggaccagatccttcccctgtagaagatgggcagccagatatatcaaggccttttggatctcagccttggcatagctgtcacaaactcatatatgtcagaccaaatcctaaaactggggttcctataggtcattggcctgttccagagtctttttggccagatcaaaattcgccaacactaccacctcgtacatctcatcctgtagtgaagttttcctgtacagactgtgaaccaatggttattgataaacttccttttgacaaatatgagttggaaccttcaccactgactcaatttatcctggaaaggaaatctcctcaaacatgttggcaggtgtacgtgagcaatagtgcaaaatacagtgaacttggtcatccttttggttacttgaaagccagtacagcactgaactgtgtcaacttatttgtgatgccttacaattatccagtccttcttcccctcttagatgacttgtttaaagtgcataaagcaaaaccaacattgaagtggagacagtcatttgaaagttatttgaagacaatgcctccctactatcttgggcccttgaagaaagctgttaggatgatgggagcacctaacctaatagcagacagtatggaatatggacttagttacagtgtcatttcatacctcaaaaaactgagtcaacaggccaaaatagaatctgatcgagtcattggatctgtaggcaaaaaagtagtacaggagactggaataaaagtccggagccgatcacatggtttatcaatggcatataggaaagattttcaacaactcctccagggaatttcagaggatgtccctcacagactgctagaccttaatatgaaggaatacactgggttccaagttgctttgctgaataaggatttgaagccacagacatttagaaatgcttatgacataccaagacgaaatcttttggatcacttaacaagaatgagatctaatcttttgaagagcactcgcagatttctgaaaggacaggacgaagatcaagtgcacagtgttcctatagcacaaatggggaactaccaggaatacctcaagcaagtaccttctccactaagagaacttgatcctgatcagccacgaaggttgcatacatttggcaacccctttaagctggataagaagggtatgatgatagatgaagcagatgaatttgtggctggacctcaaaataaacataaacgacccggagaaccaaatatgcaagggatccctaaaagacgtcggtgtatgtctccactactaagaggcagacagcagaatcctgttgtaaacaatcatattgggggaaaaggaccacctgcacctacaactcaagcacagccagatcttattaaacctcttcctcttcataaaatttcagaaaccactaatgattcgataatacatgatgtggttgaaaatcatgttgcagaccaactttcatcagacattacaccaaatgctatggatacggaattttcagcatcttctccagccagtttactggaacggccaaccaatcatatggaggctcttggtcatgaccatttaggaaccaatgacctcactgttggtggatttttagaaaatcatgaggagccaagagataaagaacaatgtgctgaagagaacataccagcatcttcactcaacaaaggaaagaaattgatgcattgcagaagccatgaagaggtcaatactgaactaaaagcacaaataatgaaagagatccgaaagccaggaagaaaatatgaaagaatcttcactttactgaagcatgtgcaaggcagtttacaaacaagactaatatttttacaaaatgtcattaaagaagcatcaaggtttaaaaaacgaatgctaatagaacaactggagaacttcttggatgaaattcatcgaagagccaatcagatcaaccatattaatagcaattaaaagaaaatagaatgtggccacttatttcactatcttcttcaaatacaaagtaaataacaagactgttgtgatcttgcattcattttctgacatgcattgttggctatttgaaatactaaaagcaaatctacagatcctttttccatcattttacagtgaccttttcttcattttggtttatttttgtaatgtgaaaagtatcactctaaaaaacatttttaatttaacaaactaaaaatattcctccaaatctcttgcttgtcattgactcttgcgtgtcaatttccctcaggttctattttcttaaaccaacctttaaaattgtcacctctgttaaggttgaactttgccaaaaaaaaaagaagttactttgtaatttttggggaaaaaagcacatacattaaaactaggtaatgttttgtatatacagttattttggatatattattgtaagttgtacaaatgtattttgaagaatatttaagaaaagcacttttgttattccatcaataaatgctctattttaaaaaaaaaaaaaaaaaaaaaaaaa

SEQ ID NO: 175 - protein, 887 aa, Homo sapiens
MPILLFLIDTSASMNQRSHLGTTYLDTAKGAVETFMKLRARDPASRGDRYMLVTFEEPPYAIKAGWKENHATFMNELKNLQAEGLTTLGQSLRTAFDLLNLNRLVTGIDNYGQGRNPFFLEPAIIITITDGSKLTTTSGVQDELHLPLNSPLPGSELTKEPFRWDQRLFALVLRLPGTMSVESEQLTGVPLDDSAITPMCEVTGGRSYSVCSPRMLNQCLESLVQKVQSGVVINFEKAGPDPSPVEDGQPDISRPFGSQPWHSCHKLIYVRPNPKTGVPIGHWPVPESFWPDQNSPTLPPRTSHPVVKFSCTDCEPMVIDKLPFDKYELEPSPLTQFILERKSPQTCWQVYVSNSAKYSELGHPFGYLKASTALNCVNLFVMPYNYPVLLPLLDDLFKVHKAKPTLKWRQSFESYLKTMPPYYLGPLKKAVRMMGAPNLIADSMEYGLSYSVISYLKKLSQQAKIESDRVIGSVGKKVVQETGIKVRSRSHGLSMAYRKDFQQLLQGISEDVPHRLLDLNMKEYTGFQVALLNKDLKPQTFRNAYDIPRRNLLDHLTRMRSNLLKSTRRFLKGQDEDQVHSVPIAQMGNYQEYLKQVPSPLRELDPDQPRRLHTFGNPFKLDKKGMMIDEADEFVAGPQNKHKRPGEPNMQGIPKRRRCMSPLLRGRQQNPVVNNHIGGKGPPAPTTQAQPDLIKPLPLHKISETTNDSIIHDVVENHVADQLSSDITPNAMDTEFSASSPASLLERPTNHMEALGHDHLGTNDLTVGGFLENHEEPRDKEQCAEENIPASSLNKGKKLMHCRSHEEVNTELKAQIMKEIRKPGRKYERIFTLLKHVQGSLQTRLIFLQNVIKEASRFKKRMLIEQLENFLDEIHRRANQINHINSN

SEQ ID NO: 176 - DNA, 2533 bp, Homo sapiens
ccaagcccatgagggccgcgcgcccggccgccggtgctgacgagacggagctcctggcccccgaggaggagcagaggatcaatgcggttcaagaatcgattccagcggttcatgaaccatcgagctccagccaatggccgctacaagccaacttgctatgaacatgctgctaactgttacacacacgcattcctcattgttccggccatcgtgggcagtgccctcctccatcggctgtctgatgactgctgggaaaagataacagcatggatttatggaatgggactctgtgccctcttcatcgcttctacagtatttcacattgtatcatggaaaaagagccacttaaggacagcggagcattgttttcacatgtgtgatagaatggttatctatttcttcattgctgcttcttatgctccatggttaaatcttcgtgaacttggacccctggcatctcatatgcgttggtttatctggctcatggcagctggaggaaccatttatgtatttctctaccatgaaaaatataaggtggttgaactctttttctatctcacaatgggattctctccagccttggtggtgacatcaatgaacaacaccgatggacttcaggaacttgcctgtgggggcttaatttattgcttgggagttgtgttcttcaagagtgatggcatcattccatttgcccacgccatctggcacctgtttgtggccacggcagctgcagtgcattactacgccatttggaaatacctttaccgaagtcctacggactttatgcggcatttatgaccaatctgtactaattctccaaaccagtattatttcaattatggcacttgggagtggggtgagagctaaacattgcacagggcaaagaaaaaaaataactgcactgactttatatcttttgaatataattactgtgaaagtataaaggctgtgttctggaattttctgcctcacagcaaataaataaggtagtgaattaattattcattccattccactatcatgaaggactctgaatagacttggccaactgatgtttacaaaccagacttttatattttaattttacagattttactacatgatttttctaaattactatgtcaggttgtaaaagtcagtgcaataacaaaccttcctttttaagaagaaaattgtttctattactttcccattcactaggtaaagaatcatggacagaacttacactactttttaccatgtttcatcttggcataacatggttcttttttaaatagaaactttagttttttgtaaatttttaaaaaaatatttcattgatatgcatctctgcaggtcctcattcatgttgtaaatttttggagcaagcagtcaacattccacaaacgaacaaacattatacctcttctgatagttttattaagcatggagaaattgccaatttttaaaaactgcagttttccaaacttttctgccaacctcttactctgaattcagtgctgctttgggacatatacttgacctagcttggtttaccagtgatggaaaagtattttgatatcattaactttttcaaaagatccaactttttctctatgcctttgccacattctcttcagggtctctttccacagcggataaatgttttttctgtattatgacagtattgttgtgatggccatctgctggaaactcctgaagagcattatgtattacagtgagcagttgtattgcctgtttggtgcccaatggttaagtcattgtcacttagctttatattgtcagtttgatatttattttaaattgtggaactagatgcataaattcacatttctgcctttcctttgcatcttctcatatattgtgttttttttttttttcctagaaaaaatatttaaagcattgtttgacaggtagaaactcatgtatctgtagtccatgagttatatcctggctcagtggagtgatatttatgtattatttttacttttctctcagtgtcttatattaagattaacatgttgttaatagttgctttgttgattaatctctcttgttggtgttttaataaatgaaataggcttgcctttagatcgggtgctgatattgcctgtttcctagtaatgggctgatcaaatgatcagtggaattcttggtttgatgataaccttattaattgaaattttttactgatgtggctttaaaagaggtttattttgtatatgtttagaactctctgattttgatgaattatatgggagtgagaaacagaagaagtggtatttgctggcgagttaaataggcaaggtacccagtgataacaccaaccaaaccactcctatctgcatgattctgaacatctggatgcctgttgttttactgtgtatattttatttttaatatattaactttgtggattcatttaaggtctactcaaaagtaacactgtccaaaccactaatatgtatgtaaaaattgtgctgtatactacaataaagttgttacttggatttgttccaaaaaaaaaaaaaaa

SEQ ID NO: 177 - protein, 238 aa, Homo sapiens
MRFKNRFQRFMNHRAPANGRYKPTCYEHAANCYTHAFLIVPAIVGSALLHRLSDDCWEKITAWIYGMGLCALFIASTVFHIVSWKKSHLRTAEHCFHMCDRMVIYFFIAASYAPWLNLRELGPLASHMRWFIWLMAAGGTIYVFLYHEKYKVVELFFYLTMGFSPALVVTSMNNTDGLQELACGGLIYCLGVVFFKSDGIIPFAHAIWHLFVATAAAVHYYAIWKYLYRSPTDFMRHL

SEQ ID NO: 178 - DNA, 5043 bp, Homo sapiens
cgcccgcgcgccccgggagcctacccagcacgcgctccgcgcccactggttccctccagccgccgccgtccagccgagtccccactccggagtcgccgctgccgcggggacatggtcctctgcgttcaggggtaagcgcggctctctgcccccttcccggccaccacgaggggcgcacgggagaacaggggcttcgtgctagctgccgggcattgggagggcttgacgggccagaggtgactgagcgcagacggacctcaggagcaaggctctgtgtggggctgtgacactcccactccccgcccccacacacttacctcaattcccactgtggattgggaaaccgggggctggccggctaaaggaggaactcacagggtgggctcagcctgggttctcattggagcagatggatgctaacggcacggcgtcccccaagatgtggccaacaatcccagatattcttctgggcccagagcactctacgctagcctgcctgctgccctgcctgctagtaaccttggaccagcccctggccccctctgtcctggtgtcccctctcctgccccaggctagcaagtaggctcttcttgggaagccagccgcagatccttgcctttcctcaggctggccacctgatggtctgcaactctcgggaggccctgggtttggcctggtcctgcttggggtacccccacaatcgtctcacaaccctgtctcagcccagtctgggatcccaatgtgagaaggaccttggctcctgcctctcatcttcaaatttcccagacttgaggtaagggacagtggagaggggatgctgataagacagagtcttgacctgagctgagcattcctggccatccactctgtcctgaacctcagcaaccccttcaaccaaagggtctgatgctggccatggtgatgtgacaggagctcaggaagctccaaggagagaggaagaaggtataaatgggtgttctgcactcagggaggactgggtggctgtgcttatcgcaactggcctggtgccaagtgagggagggtggaaggtgaggccaaggaagaggacatggaggtgctgggaagactacttctcccttgctgtctccagcaagttccttcctcctgtctgcattctgggactcctgaatacctgccccaccactgccttccaccccaggagcctccccctgcattccggggtcccatagcctctttcactttttaccctaggtgagcacccccttgtaagctcagggctactgttgggtgtcagggaacaaagttttagactgctgcgctccaaagcgggcacacacatgtacctagaacacaccagccactgtccccaccatgatgatgacacagccatggacacacccctgcccaggtacacactcaccaggagcttgtggtgatcaacacagctattcatacacccagctaccacatcagccccaaaggtgcccacacctacatgtgggatctgaggaccggctaagctatctggacgtggccacccacagaggttccagcctgactggctagccaccaaccatgctcctgggaaggtagctctgggccccagcaagcaggtcatctcaaaatttggcctccagctctccaagagggatttccaagatcccacagtacagccagggtaggtgtggaaaagtttttgtcaggctgtggtgtgccagagttgtgtggccctttctcactgtgagtggtcatagggccatgatttgttagaacctagagggtcacctataacctacacaggagtcaggtctggctcctgccaccagctcctgcctgcgccttcctgcctcacaagcaatactggcgctgtttgcccatgctgtcctctctacctggggtcccttcccccagctccttcctttggcctggaagacacagctcaggagcaagcagaccctgactcccccgtgacacctgcagttttatgactttgcattataattactcttagtgtcatcttccccagccagtctggttctccttgagggcaaggccatggtttcattatggcggtgtcctgaggcccagccagggactagacccagaactaaggcttggagatgtattttgcaaggagtgagggaggagcagctgtcttcctggggaagtagagccagtccctgctgccctcccaaggaggaagccctagtatcaccctgctgggtgggcttcccctaggagaaagctgctactcagattttggtcggctcagttcccccaaccccagccatccaagaatatggtgttactgaacctctcagtgcatgggttggtgggaccctttattgcggaaaagggaaactgaagcccagtgaagagcaagctttgtacaagatcgtagagcctggtagggctggcttgccagggtgggaactggagtgtggattaggtccctgcccttggtgggagctcatactgacaggaggtgagacttgccagtgcctttagaggccactgtccaccccagaccctccactgggagaagcagaggccaggataggctgacttgtatgggtaggggattatttcagtctctaagtcctggccagtgtggacctaggtccctctgagagacactcctatccatggggaggtagcgtgtgacctcaggcagcctaccataatcctggggcttctctggaggaccccacacagatctatcataggataaatctacttgtctgtcgtagatctatctcaactaggaccattcatcagtgggccatttaatcagcccacttcagccaggagggcacaaacatgaagctactttgcactgaatcctatcagtgtggtgagaacattagacatgcctatagggaatgatctgtgtttttggttgatataaaatagagagcaattaattactgtttagtaaatgcagggcagtggaaaagaatctttcaaaagaggatccccacatggaaacaatcaaggtggcttttgtgatgacaagtggggaacgagatactggactaactgagcccatggctgggtagaggggaagctgaggctcatagtgagatgggccagccagaggtcatgaaactagtctggggcataggggggtctctggagatgggggaagcatgggtcctccactcactgctcatccactgccttctagacctcgtcctttgctggctgtggagcggactgggcagcggcccctgtgggccccgtccctggaactgcccaagccagtcatgcagcccttgcctgctggggccttcctcgaggaggtggcagagggtaccccagcccagacagagagtgagccaaaggtgctggacccagaggaggatctgctgtgcatagccaagaccttctcctaccttcgggaatctggctggtattggggttccattacggccagcgaggcccgacaacacctgcagaagatgccagaaggcacgttcttagtacgtgacagcacgcaccccagctacctgttcacgctgtcagtgaaaaccactcgtggccccaccaatgtacgcattgagtatgccgactccagcttccgtctggactccaactgcttgtccaggccacgcatcctggcctttccggatgtggtcagccttgtgcagcactatgtggcctcctgcactgctgatacccgaagcgacagccccgatcctgctcccaccccggccctgcctatgcctaaggaggatgcgcctagtgacccagcactgcctgctcctccaccagccactgctgtacacctaaaactggtgcagccctttgtacgcagaagcagtgcccgcagcctgcaacacctgtgccgccttgtcatcaaccgtctggtggccgacgtggactgcctgccactgccccggcgcatggccgactacctccgacagtaccccttccagctctgactgtacggggcaatctgcccaccctcacccagtcgcaccctggaggggacatcagccccagctggacttgggcccccactgtccctcctccaggcatcctggtgcctgcatacctctggcagctggcccaggaagagccagcaagagcaaggcatgggagaggggaggtgtcacacaacttggaggtaaatgcccccaggccgcatgtggcttcattatactgagccatgtgtcagaggatggggagacaggcaggaccttgtctcacctgtgggctgggcccagacctccactcgcttgcctgccctggccacctgaactgtatgggcactctcagccctggtttttcaatccccagggtcgggtaggacccctactggcagccagcctctgtttctgggaggatgacatgcagaggaactgagatcgacagtgactagtgaccccttgttgaggggtaagccaggctaggggactgcacaattatacactatttatttatttattctccttggggttggtgtcaggggcgagccaaccccacctctatgccctgagccctggtagtccagagaccccaactctgccctggcttctctggttcttccctgtggaaagcccatcctgagacatcttgctggaaccaaggcaatcctggatgtcctggtactgacccacccgtctgtgaatgtgtccactctcttctgcccccagccatatttggggaggatggacaactacaataggtaagaaaatgcagccggagcctcagtccccagcagagcctgtgtctcaccccctcacaggacagagctgtatctgcatagagctggtctcactgtggcgcaggccccggggggagtgcctgtgctgtcaggaagagggggtgctggtttgagggccaccactgcagttctgctaggtctgcttcctgcccaggaaggtgcctgcacatgagaggagagaaatacacgtctgataagacttcatgaaataataattatagcaaagaacagtttggtggtcttttctcttccactgatttttctgtaatgacattatacctttattacctctttattttattacctctataataaaatgatacctttcatgt

SEQ ID NO: 179 - protein, 264 aa, Homo sapiens
MGPPLTAHPLPSRPRPLLAVERTGQRPLWAPSLELPKPVMQPLPAGAFLEEVAEGTPAQTESEPKVLDPEEDLLCIAKTFSYLRESGWYWGSITASEARQHLQKMPEGTFLVRDSTHPSYLFTLSVKTTRGPTNVRIEYADSSFRLDSNCLSRPRILAFPDVVSLVQHYVASCTADTRSDSPDPAPTPALPMPKEDAPSDPALPAPPPATAVHLKLVQPFVRRSSARSLQHLCRLVINRLVADVDCLPLPRRMADYLRQYPFQL

SEQ ID NO: 180 - DNA, 3572 bp, Homo sapiens
gagttgtagccgaggtggcggcgcggggcggggcgggcggagagagaaggaaggaggtggttgtgcaggatggcgacggcggcctacgagcagctgaagctgcatatcacacctgaaaaattttatgtggaagcttgtgatgatggagcagatgacgtacttaccattgaccgtgtgtccacagaggttacccttgcagtcaagaaagatgttcctccttcagctgtcacaagaccaatatttggtatactgggcacaatccatctggtggcaggtaattatcttatagtcattaccaaaaagataaaagtaggtgaatttttcagtcatgtagtctggaaagcaacagattttgatgtcctttcttataagaagacaatgttgcacttaactgatattcagttacaagataataaaaccttcctagcgatgctaaaccatgtcttgaatgtggatggattttacttttcaacaacatatgatttgacccatactttgcagcggctatccaacactagtcctgaattccaagaaatgagtctcttggaaagggcagatcagcggtttgtatggaatggtcatcttctaagagaactttctgcacagccagaggttcatcggtttgcccttccagtgttacatggctttattaccatgcattcatgttctattaatggaaaatactttgattggattctcatctcgaggaggagctgtttcagagctggtgtgcgctattatgtaagaggaattgattcggaaggccatgcagctaactttgtagaaacagaacaaattgtgcactacaatgggagcaaagcttcgtttgtacagactcgaggatcaatacctgttttctggtcccaaagaccaaacctcaagtacaaaccactgccacagatcagcaaagtagcaaatcacatggacggtttccaaaggcattttgattcccaagtaattatttatggaaaacaagttataatcaatctgattaaccagaagggctcggagaagccacttgagcagacatttgcaacaatggtgtcttccttgggaagtggaatgatgagatacattgcctttgacttccataaggaatgtaaaaatatgagatgggatcgactaagtattttattggatcaggtagcagaaatgcaagatgaattaagttattttctagtggactctgctggccaggtggtggcaaaccaggaaggcgtgttccgaagcaattgcatggattgtctagatagaaccaatgtgatccagagtttgttagctcgtcgttcacttcaggcccaacttcagagactaggagttttgcatgtgggacaaaagcttgaagaacaagatgaatttgagaagatttacaaaaatgcctgggctgacaacgcaaatgcttgtgccaagcaatatgcgggaactggtgccttgaagactgactttaccagaactggaaagagaactcatttgggacttataatggatggctggaactcaatgatacgatattataagaacaacttttccgatggatttagacaagattccatagacttatttcttggaaactattcagtggatgaattagaatctcatagtcctttaagtgttccaagggactggaaattcctggctttgcctattatcatggttgttgccttttcaatgtgcattatctgtttgcttatggctggtgacacttggacagaaacactggcctatgtgctcttctggggagttgcaagcattggaacattttttatcattctttacaatggcaaagattttgtcgatgctcccagactggtccagaaagaaaagatagactgaatttgtatttgtggaaagcggcttggcttggaagattccattgtgcagaactggagtctttactgacccgctttccacatcagcccaaggtctttttaatgcctttatccaaaagcacatcttgtgctccatgcaggatgatgacagaattgatctgatgttactgccttgatggtctctttactattgggacagttagatttataatttgaagctattctgtaattaaaatataacctgaattcagcttgcagaatggaagctgaatctgttcattgtattctattgattgtcaatttaattagctgttgcagaataagtaatatattttaaaaacctagctcctttcattatttaaaacagcaaaattatttttgtagctcagtttcattattgtcattgtagaagcggtcactattagcaggcatacttttccacacatctttggacttttcttaaaagttcagtaataagctaactgtgtttataaaatgtaagtctcttacagacatcaagtagtttgatgagacagtctgtgacttcatgataggaaagaggaggatgaggtctggggttctttaaagtctctggtgggctgcctcatgactttaatcagcttgaactgccagtgcaccagcagtttaggtgtgatgagagaattcagatatactttatctttttaaaaaagtgtaaataaaatcaaagaatgtaaagtctatctcttacgctagaggtccaaagctgcctctgttttaaagattatcccaatgtggaagatgcccatgactggtcagctacttcctcctatacattttggtttctttgagggtcactcattgagacacgcaggcctctgagagggtcttgttctagatttcatattgcacttggagggtaacagctgctttttcacgcatggtactcttgatgtttttcactctgtcaaggattttgttggctatcaatgaatgtgtctaaaacttagtgcttccaggtagttatagtactccaaatcaaggaccaacttaaacgttaatttttgtgcaaaaacaaacctgaaaaatatgcttcggaaactgtgcatagttctaattgtaagtcagattgtatattcaaattgtaattaagagatttaaatattagaacggtatgtaaggtagtataattaccactattttaaataattcagttaaacactgctgcaatatttcagtgttgtgcttgaaaatatgtacagtttttttccaatattaataccttatgttgtccttaaatatttctaaaagcgcctttatttcagcattacctttttttcatcactatcttttataaaacattaatataagtcgttacttttagaaactaaaggaaataatagctggaaaaccctctgtagtttaaaatcagtcattaaactcacaatagggtaagtaaatatagccacctgttaacatgtaaataagcataatttgttccaaagatggaatattgaaacttagttcatgtctgctgtaaaatattatttaaatgctgctgggcatttcacttaaagaacttaatgtcaacagctacaacaaagaccaaatctgaactgctaatgtggctgctttgtagggaatggactaatatcagtgtgttagatcttaaggtatcagtatttcagaatcctgcgacgattttatttctaaattcatgtactgtatgtccataagtgaaaataaaatgtcatattcttttct

SEQ ID NO: 181 - protein, 587 aa, Homo sapiens
MATAAYEQLKLHITPEKFYVEACDDGADDVLTIDRVSTEVTLAVKKDVPPSAVTRPIFGILGTIHLVAGNYLIVITKKIKVGEFFSHVVWKATDFDVLSYKKTMLHLTDIQLQDNKTFLAMLNHVLNVDGFYFSTTYDLTHTLQRLSNTSPEFQEMSLLERADQRFVWNGHLLRELSAQPEVHRFALPVLHGFITMHSCSINGKYFDWILISRRSCFRAGVRYYVRGIDSEGHAANFVETEQIVHYNGSKASFVQTRGSIPVFWSQRPNLKYKPLPQISKVANHMDGFQRHFDSQVIIYGKQVIINLINQKGSEKPLEQTFATMVSSLGSGMMRYIAFDFHKECKNMRWDRLSILLDQVAEMQDELSYFLVDSAGQVVANQEGVFRSNCMDCLDRTNVIQSLLARRSLQAQLQRLGVLHVGQKLEEQDEFEKIYKNAWADNANACAKQYAGTGALKTDFTRTGKRTHLGLIMDGWNSMIRYYKNNFSDGFRQDSIDLFLGNYSVDELESHSPLSVPRDWKFLALPIIMVVAFSMCIICLLMAGDTWTETLAYVLFWGVASIGTFFIILYNGKDFVDAPRLVQKEKID

SEQ ID NO: 182 - DNA, 2014 bp, Homo sapiens
cagtgcggcggatgtacggatgattcagtggctggcaggaagcccgccctgcccgcccgccagtgtcagtggtgttggcatcagcttgggcaggtgtgcgggctcaggatggggcggccgtgttgaggaaccctggactctcagagatggaatttcaccgtgttgcctaggctggtctggagctcttgatctcaagcgatcctccctgcctcggcctcccaacgtgctgggattataggcgtgagccaccgctcctggccagggtctgttcctagttgcaacagttcttggaaacccactcgagagggccacgcctccattcaccaggccacgcatcacaagaggcaacaccaggagccaacatgagctcggggactgaactgctgtggcccggagcagcgctgctggtgctgttgggggtggcagccagtctgtgtgtgcgctgctcacgcccaggtgcaaagaggtcagagaaaatctaccagcagagaagtctgcgtgaggaccaacagagctttacggggtcccggacctactccttggtcgggcaggcatggccaggacccctggcggacatggcacccacaaggaaggacaagctgttgcaattctaccccagcctggaggatccagcatcttccaggtaccagaacttcagcaaaggaagcagacacgggtcggaggaagcctacatagaccccattgccatggagtattacaactgggggcggttctcgaagcccccagaagatgatgatgccaattcctacgagaatgtgctcatttgcaagcagaaaaccacagagacaggtgcccagcaggagggcataggtggcctctgcagaggggacctcagcctgtcactggccctgaagactggccccacttctggtctctgtccctctgcctccccggaagaagatgaggaatctgaggattatcagaactcagcatccatccatcagtggcgcgagtccaggaaggtcatggggcaactccagagagaagcatcccctggcccggtgggaagcccagacgaggaggacggggaaccggattacgtgaatggggaggtggcagccacagaagcctagggcagaccaagaagaaaggagccaaggcaaagagggaccactgtgctcatggacccatcgctgccttccaaggaccatttcccagagctactcaacttttaagcccctgccatggttgctcctggaaggagaaccagccaccctgaggaccacctggccatgcgtgcacagcctgggaaaagacagttactcacgggagctgcaggcccgtcaccaagccctctcccgacccaggctttgtggggcaggcacctggtaccaagggtaacccggctcctggtatggacggatgcgcaggatttaggataagctgtcacccagtccccataacaaaaccactgtccaacactggtatctgtgttcttttgtgctatgaatttggattcctaattgctattgttggttgctggggttttaaatgattgataagcttgtacagttaacttatagagggggagccatatttaacattctggatttcagagtagagatttctgtgttgtctcctagaaagcattacatgtagtttatttcagcatccttgttgggtggggccctggctctcttcccctttggtgggacctcccctttctttgggcttcagttcactcaggaagaaatgaggctgtcgccatctttatgtgcttccagtggaaatgtcacttgctacagacaatagtgcatgagagtctagagaagtagtgaccagaacagggcagagtaggtcccctccatggccctgaatcctcctctgctccagggctggcctctgcagagctgattaaacagtgttgtgactgtctcatgggaagagctggggcccagagggaccttgagtcagaaatgttgccagaaaaagtatctcctccaaccaaaacatctcaataaaaccattttagttgaaaaaaaaaaaaaaaaaa

SEQ ID NO: 183 - protein, 243 aa, Homo sapiens
MSSGTELLWPGAALLVLLGVAASLCVRCSRPGAKRSEKIYQQRSLREDQQSFTGSRTYSLVGQAWPGPLADMAPTRKDKLLQFYPSLEDPASSRYQNFSKGSRHGSEEAYIDPIAMEYYNWGRFSKPPEDDDANSYENVLICKQKTTETGAQQEGIGGLCRGDLSLSLALKTGPTSGLCPSASPEEDEESEDYQNSASIHQWRESRKVMGQLQREASPGPVGSPDEEDGEPDYVNGEVAATEA

SEQ ID NO: 184 - DNA, 1563 bp, Homo sapiens
agttgcagtggaaagaaatgtgtcatctgtggtttggtttttaaaagtggaaaactagctgcacatatccttttttactgcagatttactttaaggctcatattctccaagtctattctgctttaaaaagaagacaagaaaagaagtggtttatcaaaatcacgttataatcagattttgaccaagcattttgtaagattgccaagtatgcccacggacatggaacacacaggacattacctacatcttgcctttctgatgacaacagttttttctttgtctcctggaacaaaagcaaactatacccgtctgtgggctaacagtacttcttcctgggattcagttattcaaaacaagacaggcagaaaccaaaatgaaaacattaacacaaaccctataactcctgaagtagattataaaggtaattctacaaacatgcctgaaacatctcacatcgtagctttaacttctaaatctgaacaggagctttatataccttctgtcgtcagcaacagtccttcaacagtacagagcattgaaaacacaagcaaaagtcatggtgaaattttcaaaaaggatgtctgtgcggaaaacaacaacaacatggctatgctaatttgcttaattataattgcagtgctttttcttatctgtacctttctatttctatcaactgtggttttggcaaacaaagtctcttctctcagacgatcaaaacaagtaggcaagcgtcagcctagaagcaatggcgattttctggcaagcggtctatggcccgctgaatcagacacttggaaaagaacaaaacagctcacaggacccaacctagtgatgcaatctactggagtgctcacagctacaagggaaagaaaagatgaagaaggaactgaaaaacttactaacaaacagataggttagtgaagaaaaatgcaaagtagcaatgagaaggcttatggagtaaaaatgaagtcagttggtatttaatcccaaagtgttgttctgattatctaaaatttgacatggtagaccttgcaatttagaatcaagcaggtgagacagggagaagtatgcctgcttaattatttaaactgtgtacttttgttttgacactgaatattttaaaaagcaaataataaaataactaagcatttgaggaaaattttaaggataaattgaggaaactgattaatagagatagcaagggataattaaataaatattccctatgtagcaacagtggttagatgatctttgtctgaatgtaataaaactttgaatagttttagtgtgtccttaaagccaagtatatgctttaacatcaaatggaagtcaaattcctaatgcatagatagagagagctaaactgtgtaatttaatggtatcttccttgctggatgtggcagaatccacaccagcttatcaaccaacacagctaattttagaataggtcctttatctttccatatggcacacgtaagaaagtgtttttctactattaatattaaattaaaacctttacttttgtataataaattaaaactcagaataaacctgtgaccacgt

SEQ ID NO: 185 - protein, 232 aa, Homo sapiens
MEHTGHYLHLAFLMTTVFSLSPGTKANYTRLWANSTSSWDSVIQNKTGRNQNENINTNPITPEVDYKGNSTNMPETSHIVALTSKSEQELYIPSVVSNSPSTVQSIENTSKSHGEIFKKDVCAENNNNMAMLICLIIIAVLFLICTFLFLSTVVLANKVSSLRRSKQVGKRQPRSNGDFLASGLWPAESDTWKRTKQLTGPNLVMQSTGVLTATRERKDEEGTEKLTNKQIG

SEQ ID NO: 186 - DNA, 1104 bp, Homo sapiens
ggtcgcttggtggctccgtctgttgtccgtccgcccgcgggtgccatcatggcggacgcggccagtcaggtgctcctgggctccggtctcaccatcctgtcccagccgctcatgtacgtgaaagtgctcatccaggtgggatatgagcctcttcctccaacaataggacgaaatatttttgggcggcaagtgtgtcagcttcctggtctctttagttatgctcagcacattgccagtatcgatgggaggcgcgggttgttcacaggcttaactccaagactgtgttcgggagtccttggaactgtggtccatggtaaagttttacagcattaccaggagagtgacaagggtgaggagttaggacctggaaatgtacagaaagaagtctcatcttcctttgaccacgttatcaaggagacaactcgagagatgatcgctcgttctgctgctaccctcatcacacatcccttccatgtgatcactctgagatctatggtacagttcattggcagagaatccaagtactgtggactttgtgattccataataaccatctatcgggaagagggcattctaggatttttcgcgggtcttgttcctcgccttctaggtgacatcctttctttgtggctgtgtaactcactggcctacctcgtcaatacctatgcactggacagtggggtttctaccatgaatgaaatgaagagttattctcaagctgtcacaggattttttgcgagtatgttgacctatccctttgtgcttgtctccaatcttatggctgtcaacaactgtggtcttgctggtggatgccctccttactccccaatatatacgtcttggatagactgttggtgcatgctacaaaaagaggggaatatgagccgaggaaatagcttatttttccggaaggtcccctttgggaagacttattgttgtgacctgaaaatgttaatttgaagatgtggggcagggacagtgacatttctgtagtcccagatgcacagaattatgggagagaatgttgatttctatacagtgtggcgcgcttttttaataatcatttaatcttgggaaaattaaaaaaaaaaaaaaaaaaaaaaa

SEQ ID NO: 187 - protein, 303 aa, Homo sapiens
MADAASQVLLGSGLTILSQPLMYVKVLIQVGYEPLPPTIGRNIFGRQVCQLPGLFSYAQHIASIDGRRGLFTGLTPRLCSGVLGTVVHGKVLQHYQESDKGEELGPGNVQKEVSSSFDHVIKETTREMIARSAATLITHPFHVITLRSMVQFIGRESKYCGLCDSIITIYREEGILGFFAGLVPRLLGDILSLWLCNSLAYLVNTYALDSGVSTMNEMKSYSQAVTGFFASMLTYPFVLVSNLMAVNNCGLAGGCPPYSPIYTSWIDCWCMLQKEGNMSRGNSLFFRKVPFGKTYCCDLKMLI

SEQ ID NO: 188 - DNA, 1884 bp, Homo sapiens
gacgtgaacggtcgttgcagagattgcgggcggctgagacgccgcctgcctggcacctaggagcgcagcggagccccgacaccgccgccgccgccatggagtccgagaccgaacccgagcccgtcacgctcctggtgaagagccccaaccagcgccaccgcgacttggagctgagtggcgaccgcggctggagtgtgggccacctcaaggcccacctgagccgcgtctaccccgagcgtccgcgtccagaggaccagaggttaatttattctgggaagctgttgttggatcaccaatgtctcagggacttgcttccaaagcaggaaaaacggcatgttttgcatctggtgtgcaatgtgaagagtccttcaaaaatgccagaaatcaacgccaaggtggctgaatccacagaggagcctgctggttctaatcggggacagtatcctgaggattcctcaagtgatggtttaaggcaaagggaagttcttcggaacctttcttcccctggatgggaaaacatctcaaggcctgaagctgcccagcaggcattccaaggcctgggtcctggtttctccggttacacaccctatgggtggcttcagctttcctggttccagcagatatatgcacgacagtactacatgcaatatttagcagccactgctgcatcaggggcttttgttccaccaccaagtgcacaagagatacctgtggtctctgcacctgctccagcccctattcacaaccagtttccagctgaaaaccagcctgccaatcagaatgctgctcctcaagtggttgttaatcctggagccaatcaaaatttgcggatgaatgcacaaggtggccctattgtggaagaagatgatgaaataaatcgagattggttggattggacctattcagcagctacattttctgtttttctcagtatcctctacttctactcctccctgagcagattcctcatggtcatgggggccaccgttgttatgtacctgcatcacgttgggtggtttccatttagaccgaggccggttcagaacttcccaaatgatggtcctcctcctgacgttgtaaatcaggaccccaacaataacttacaggaaggcactgatcctgaaactgaagaccccaaccacctccctccagacagggatgtactagatggcgagcagaccagcccctcctttatgagcacagcatggcttgtcttcaagactttctttgcctctcttcttccagaaggccccccagccatcgcaaactgatggtgtttgtgctgtagctgttggaggctttgacaggaatggactggatcacctgactccagctagattgcctctcctggacatggcaatgatgagtttttaaaaaacagtgtggatgatgatatgcttttgtgagcaagcaaaagcagaaacgtgaagccgtgatacaaattggtgaacaaaaaatgcccaaggcttctcatgtctttattctgaagagctttaatatatactctatgtagtttaataagcactgtacgtagaaggccttaggtgttgcatgtctatgcttgaggaacttttccaaatgtgtgtgtctgcatgtgtgtttgtacatagaagtcatagatgcagaagtggttctgctggtacgatttgattcctgttggaatgtttaaattacactaagtgtactactttatataatcaatgaaattgctagacatgttttagcaggacttttctaggaaagacttatgtataattgctttttaaaatgcagtgctttactttaaactaaggggaactttgcggaggtgaaaacctttgctgggttttctgttcaataaagttttactatgaatgaccctgaaaaaaaaaaaaaaaaaaaaaa

SEQ ID NO: 189 - protein, 391 aa, Homo sapiens
MESETEPEPVTLLVKSPNQRHRDLELSGDRGWSVGHLKAHLSRVYPERPRPEDQRLIYSGKLLLDHQCLRDLLPKQEKRHVLHLVCNVKSPSKMPEINAKVAESTEEPAGSNRGQYPEDSSSDGLRQREVLRNLSSPGWENISRPEAAQQAFQGLGPGFSGYTPYGWLQLSWFQQIYARQYYMQYLAATAASGAFVPPPSAQEIPVVSAPAPAPIHNQFPAENQPANQNAAPQVVVNPGANQNLRMNAQGGPIVEEDDEINRDWLDWTYSAATFSVFLSILYFYSSLSRFLMVMGATVVMYLHHVGWFPFRPRPVQNFPNDGPPPDVVNQDPNNNLQEGTDPETEDPNHLPPDRDVLDGEQTSPSFMSTAWLVFKTFFASLLPEGPPAIAN

SEQ ID NO: 190 - DNA, 4565 bp, Homo sapiens
ggcgagctaagccggaggatgtgcagctgcggcggcggcgccggctacgaagaggacggggacaggcgccgtgcgaaccgagcccagccagccggaggacgcgggcagggcgggacgggagcccggactcgtctgccgccgccgtcgtcgccgtcgtgccggccccgcgtccccgcgcgcgagcgggaggagccgccgccacctcgcgcccgagccgccgctagcgcgcgccgggcatggtcccctcttaaaggcgcaggccgcggcggcgggggcgggcgtgcggaacaaagcgccggcgcggggcctgcgggcggctcgggggccgcgatgggcgcggcgggcccgcggcggcggcggcgctgcccgggccgggcctcgcggcgctagggcgggctggcctccgcgggcgggggcagcgggctgagggcgcgcggggcctgcggcggcggcggcggcggcggcggcggcccggcgggcggagcggcgcgggcatggccgcgcgcggccggcgcgcctggctcagcgtgctgctcgggctcgtcctgggcttcgtgctggcctcgcggctcgtcctgccccgggcttccgagctgaagcgagcgggcccacggcgccgcgccagccccgagggctgccggtccgggcaggcggcggcttcccaggccggcggggcgcgcggcgatgcgcgcggggcgcagctctggccgcccggctcggacccagatggcggcccgcgcgacaggaactttctcttcgtgggagtcatgaccgcccagaaatacctgcagactcgggccgtggccgcctacagaacatggtccaagacaattcctgggaaagttcagttcttctcaagtgagggttctgacacatctgtaccaattccagtagtgccactacggggtgtggacgactcctacccgccccagaagaagtccttcatgatgctcaagtacatgcacgaccactacttggacaagtatgaatggtttatgagagcagatgatgacgtgtacatcaaaggagaccgtctggagaacttcctgaggagtttgaacagcagcgagcccctctttcttgggcagacaggcctgggcaccacggaagaaatgggaaaactggccctggagcctggtgagaacttctgcatgggggggcctggcgtgatcatgagccgggaggtgcttcggagaatggtgccgcacattggcaagtgtctccgggagatgtacaccacccatgaggacgtggaggtgggaaggtgtgtccggaggtttgcaggggtgcagtgtgtctggtcttatgagatgcagcagcttttttatgagaattacgagcagaacaaaaaggggtacattagagatctccataacagtaaaattcaccaagctatcacattacaccccaacaaaaacccaccctaccagtacaggctccacagctacatgctgagccgcaagatatccgagctccgccatcgcacaatacagctgcaccgcgaaattgtcctgatgagcaaatacagcaacacagaaattcataaagaggacctccagctgggaatccctccctccttcatgaggtttcagccccgccagcgagaggagattctggaatgggagtttctgactggaaaatacttgtattcggcagttgacggccagccccctcgaagaggaatggactccgcccagagggaagccttggacgacattgtcatgcaggtcatggagatgatcaatgccaacgccaagaccagagggcgcatcattgacttcaaagagatccagtacggctaccgccgggtgaaccccatgtatggggctgagtacatcctggacctgctgcttctgtacaaaaagcacaaagggaagaaaatgacggtccctgtgaggaggcacgcgtatttacagcagactttcagcaaaatccagtttgtggagcatgaggagctggatgcacaagagttggccaagagaatcaatcaggaatctggatccttgtcctttctctcaaactccctgaagaagctcgtcccctttcagctccctgggtcgaagagtgagcacaaagaacccaaagataaaaagataaacatactgattcctttgtctgggcgtttcgacatgtttgtgagatttatgggaaactttgagaagacgtgtcttatccccaatcagaacgtcaagctcgtggttctgcttttcaattctgactccaaccctgacaaggccaaacaagttgaactgatgacagattaccgcattaagtaccctaaagccgacatgcagattttgcctgtgtctggagagttttcaagagccctggccctggaagtaggatcctcccagtttaacaatgaatctttgctcttcttctgcgacgtcgacctcgtctttactacagaattccttcagcgatgtcgagcaaatacagttctgggccaacaaatatattttccaatcatcttcagccagtatgacccaaagattgtttatagtgggaaagttcccagtgacaaccattttgcctttactcagaaaactggcttctggagaaactatgggtttggcatcacgtgtatttataagggagatcttgtccgagtgggtggctttgatgtttccatccaaggctgggggctggaggatgtggaccttttcaacaaggttgtccaggcaggtttgaagacgtttaggagccaggaagtaggagtagtccacgtccaccatcctgtcttttgtgatcccaatcttgaccccaaacagtacaaaatgtgcttggggtccaaagcatcgacctatgggtccacacagcagctggctgagatgtggctggaaaaaaatgatccaagttacagtaaaagcagcaataataatggctcagtgaggacagcctaatgtccagctttgctggaaaagacgtttttaattatctaatttatttttcaaaaattttttgtatgatcagtttttgaagtccgtatacaaggatatattttacaagtggttttcttacataggactcctttaagattgagctttctgaacaagaaggtgatcagtgtttgcctttgaacacatcttcttgctgaacattatgtagcagacctgcttaactttgacttgaaatgtacctgatgaacaaaacttttttaaaaaaatgttttcttttgagaccctttgctccagtcctatggcagaaaacgtgaacattcctgcaaagtattattgtaacaaaacactgtaactctggtaaatgttctgttgtgattgttaacattccacagattctaccttttgtgttttgtttttttttttttacaattgttttaaagccatttcatgttccagttgtaagataaggaaatgtgataatagctgtttcatcattgtcttcaggagagctttccagagttgatcatttcccctcatggtactctgctcagcatggccacgtaggttttttgtttgttttgttttgttctttttttgagacggagtctcactctgttacccaggctggaatgcagtggcgcaatcttggctcactttaacctccacttccctggttcaagcaattcccctgcctttgcctcccgagtagctgggattacaggcacacaccaccacgcccagctagtttttttgtatttttagtagagacggggtttcaccatgcaagcccagctggccacgtaggttttaaagcaaggggcgtgaagaaggcacagtgaggtatgtggctgttctcgtggtagttcattcggcctaaatagacctggcattaaatttcaagaaggatttggcattttctcttcttgacccttctctttaaagggtaaaatattaatgtttagaatgacaaagatgaattattacaataaatctgatgtacacagactgaaacacacacacatacaccctaatcaaaacgttggggaaaaatgtatttggttttgttcctttcatcctgtctgtgttatgtgggtggagatggttttcattctttcattactgttttgttttatcctttgtatctgaaatacctttaatttatttaatatctgttgttcagagctctgccatttcttgagtacctgttagttagtattatttatgtgtatcgggagtgtgtttagtctgttttatttgcagtaaaccgatctccaaagatttccttttggaaacgctttttcccctccttaatttttatattccttactgttttactaaatattaagtgttctttgacaattttggtgctcatgtgttttggggacaaaagtgaaatgaatctgtcattataccagaaagttaaattctcagatcaaatgtgccttaataaatttgttttcatttagatttcaaacagtgatagacttgccattttaatacacgtcattggagggctgcgtatttgtaaatagcctgatgctcatttggaaaaataaaccagtgaacaatatttttctattgtacttttcagaaccattttgtctcattattcctgttttagctgaagaattgtattacatttggagagtaaaaaacttaaacacg

SEQ ID NO: 191 - protein, 802 aa, Homo sapiens
MAARGRRAWLSVLLGLVLGFVLASRLVLPRASELKRAGPRRRASPEGCRSGQAAASQAGGARGDARGAQLWPPGSDPDGGPRDRNFLFVGVMTAQKYLQTRAVAAYRTWSKTIPGKVQFFSSEGSDTSVPIPVVPLRGVDDSYPPQKKSFMMLKYMHDHYLDKYEWFMRADDDVYIKGDRLENFLRSLNSSEPLFLGQTGLGTTEEMGKLALEPGENFCMGGPGVIMSREVLRRMVPHIGKCLREMYTTHEDVEVGRCVRRFAGVQCVWSYEMQQLFYENYEQNKKGYIRDLHNSKIHQAITLHPNKNPPYQYRLHSYMLSRKISELRHRTIQLHREIVLMSKYSNTEIHKEDLQLGIPPSFMRFQPRQREEILEWEFLTGKYLYSAVDGQPPRRGMDSAQREALDDIVMQVMEMINANAKTRGRIIDFKEIQYGYRRVNPMYGAEYILDLLLLYKKHKGKKMTVPVRRHAYLQQTFSKIQFVEHEELDAQELAKRINQESGSLSFLSNSLKKLVPFQLPGSKSEHKEPKDKKINILIPLSGRFDMFVRFMGNFEKTCLIPNQNVKLVVLLFNSDSNPDKAKQVELMTDYRIKYPKADMQILPVSGEFSRALALEVGSSQFNNESLLFFCDVDLVFTTEFLQRCRANTVLGQQIYFPIIFSQYDPKIVYSGKVPSDNHFAFTQKTGFWRNYGFGITCIYKGDLVRVGGFDVSIQGWGLEDVDLFNKVVQAGLKTFRSQEVGVVHVHHPVFCDPNLDPKQYKMCLGSKASTYGSTQQLAEMWLEKNDPSYSKSSNNNGSVRTA

SEQ ID NO: 192 - DNA, 6028 bp, Homo sapiens
ggtgtggacgttgtctaaatttcggtagccatggcacaagaatataagaaagcatgggattatggcaaccacagaatctcagtagtacaagttccattcagttttttctgaaagaaagccctctgttaaagtgaagcaaagaaactgttgtggattataacgtttagaagttccaatttttcagtgctttacaaataaagcatcatttaaccttttaaatgaaaaagattaagatctcatgcaactgttgtattttctggaagccattctccaaaagggaagtgcacatttaaaacacagatatgatggtccttgctgcagggatttaagtctacttgcttttacatcatgaccagcttgaaacggtcacagacagaaaggcctcttgccactgacagggcctctgttgttggcacagacggcacccccaaagtccacactgatgatttctacatgcggcgcttccggtcccaaaatggcagcttaggatcatcagttatggctcctgtaggacccccccgaagtgaaggttctcaccatataacctcaacccccggagtcccaaaaatgggggtaagggcaaggattgcagattggcccccaagaaaggaaaacataaaagaatctagccgttcaagccaggaaatagaaacctcaagttgccttgatagcctgtcctccaaaagcagtcctgtgagtcagggaagttctgttagcctcaattccaatgactcagccatgctgaaaagcatacagaacacgctgaaaaacaagacaagaccgtcggagaacatggactccagatttctcatgcctgaagcctaccccagctcccccagaaaagctcttcgcagaatacgccagcgaagcaacagtgatatcaccataagtgaacttgatgtggatagctttgatgaatgtatctcacctacatacaagactggaccatcactgcacagggaatatggtagcacatcttcaattgataaacagggaacatctggagaaagcttttttgatttgttaaagggctacaaagatgacaaatctgatcgaggtccaactccaaccaagctcagtgactttctcattactggtggtggcaagggttctggtttctctttggatgtaatagacgggcctatctcacagagagagaacctcaggctttttaaggaaagggaaaaaccactcaagcgacgttcaaaatctgaaactggagactcctctatttttcgtaaattgcgcaatgccaaaggtgaagaacttgggaagtcatcagatcttgaagataaccgatcagaagactctgtcaggccctggacatgtccaaagtgctttgcccactatgatgtccagagtatattatttgatttgaatgaggcaattatgaacaggcacaatgttattaagaggagaaacaccaccactggagcttccgcagctgccgtggcatccttggtctctggacctctgtctcattcagccagttttagctccccaatgggcagcacagaggacctgaattccaaaggaagcctcagcatggaccagggagatgataaaagcaatgagcttgtaatgagctgtccatattttcggaatgagataggtggagaaggggagaggaaaatcagcctttcaaaatcaaattctggctcctttagtggatgtgaaagtgcctcctttgagtctacccttagttcccattgcacaaatgcaggagtggcagtacttgaagtgcccaaggagaacttggtgttgcacctagatagagtgaaaagatacatcgtggaacacgtagatctgggtgcatactattatagaaaatttttctaccagaaggaacactggaactattttggggctgatgagaatcttggtccagtggctgtgagcattcgaagggaaaaaccagatgaaatgaaagaaaatggatctccgtacaactaccgaataatttttagaactagtgagctcatgacactgagaggttcggtcctggaggacgccattccgtcgacagccaagcactcgacagccagaggcctgcctctcaaagaagtgctggagcacgtggttcctgagctcaatgtccagtgcctgcggttggccttcaacacacccaaggtcacagagcagctcatgaaactggatgaacaagggctgaactaccagcagaaagtaggcatcatgtactgcaaagctggacagagcactgaagaagagatgtacaacaatgagtcagctggcccagcctttgaagaattccttcaactattgggagagcgagttcggctcaaaggatttgagaagtatcgagcacagcttgataccaaaactgactccactggaacccattctctgtacacaacatacaaagattatgaaattatgttccatgtttctaccatgctgccatacacacccaacaacaaacaacagctcctgaggaagcggcacattggaaatgatatcgtaacaattgttttccaagagcctggagcacagccattcagcccaaaaaacatccgatcccacttccagcacgttttcgtcatcgtcagggtgcacaatccgtgctctgacagtgtctgttatagtgtggctgttaccaggtccagagatgtgccttcctttgggcctcccattcctaaaggggtcactttccctaagtcaaatgtgttcagggacttccttttggcgaaagtgattaatgcagaaaatgctgctcataaatcggagaagtttcgggccatggcaactcggacccgccaggaatacctgaaagatctggcagaaaagaatgtcaccaacacccctatcgacccttctggcaagtttccgttcatctctctggcttccaagaagaaggaaaagtctaagccatatccaggagccgagctcagcagcatgggggccattgtatgggcagtccgggctgaagactacaacaaggccatggaactagactgccttttagggatctccaatgagttcattgtgctcattgaacaggaaacaaagagcgtggtcttcaattgttcctgtagagatgtgatagggtggacttcaactgacaccagcctcaaaatcttctatgaacgaggagaatgtgtttcagtgggtagttttattaacattgaggagatcaaagagattgtcaaaaggttgcagtttgtttcaaaaggctgtgaatcggtggagatgactctgcgaagaaatgggctaggacagcttggcttccatgtcaactatgagggcattgtggcggatgtggagccctacggttatgcctggcaggcagggctgaggcagggcagtcgcctggtggagatctgcaaggtggcggtagccactctgagccatgagcagatgatcgacctcctgagaacatctgtcacggtgaaggttgtcatcattcccccgcatgatgactgcaccccgcggaggagttgctctgaaacctaccgcatgccagtgatggagtacaaaatgaatgaaggtgtttcatacgaattcaagtttcccttccgaaataataacaagtggcagaggaacgccagcaaggggcctcattcacctcaagtcccgtcccaggtgcagagtcccatgacctcgcggctgaatgctggaaaaggagatgggaagatgcctcctccagaaagagccgccaacatccctcgaagcatctccagtgacgggcgcccactagagaggcggctgtctcctggttcggacatctatgtgacggtctcatccatggctttagcaagatcccagtgtcggaactctcctagcaacttgtcttcatccagtgatactggttctgtggggggcacttacaggcagaagtccatgcccgaagggtttggagtgagccgtagatccccagcctccattgacaggcagaacacccagtcagatattggtggcagcggaaaatccacgcctagctggcaaagaagtgaggatagcattgctgaccagatggcttacagttatagaggacctcaggatttcaattcttttgtcctcgagcagcatgaatatacagagccaacatgccatctcccagcagtatcaaaggtactgccagctttccgagagagccccagtgggagattaatgcggcaggatccagtggttcatttgtctccaaacaaacaagggcattctgatagccactactcgagccactccagtagcaatactctctccagcaatgcgtcaagtgcccatagtgatgagaagtggtacgatggggaccgcacagaatccgaactcaacagctataactatctgcaaggcacctctgctgacagtggcattgacaccacctcttatggccccagccacggcagcacagcctcgctgggggctgccacatcgtcacctcgctcagggccaggcaaggagaaagtggcacccctatggcacagctccagtgaagtaatctccatggcagatcggactttggagacagagagccacggcctggaccggaaaacagagtcttccctgagcttagacatacacagcaagagccaagccggctcgacccctctgacaagggagaacagcaccttcagtataaacgatgctgcttcccacacaagtaccatgagctcccgacactctgccagcccagtggttttcaccagtgcccggagttcacctaaagaagagcttcatccagctgccccctcacagctcgcaccatccttctcctcctcttcctcctcctcctctggtcctaggagtttttaccctcgccagggcgctactagcaagtacctgattggatggaaaaaacccgaaggaaccataaactccgtgggatttatggacacgagaaagcgtcatcagagcgatggcaatgaaatagcccacaccaggctgcgtgcctcaaccagagacctccgggcatctcctaagccaacctccaagtccaccattgaagaagatctaaagaaactaattgatcttgaaagcccaactcctgaatcacagaagagttttaagttccacgcactctcctctcctcagtctcctttccccagcacccccacctcacggcgggccttgcacagaacactgtcggacgagagcatttacaatagccagagggagcactttttcacctccagggcgtcacttctggaccaagccctgcccaacgacgtcctcttcagtagcacgtacccttctctccccaagtcgctcccgttgaggaggccttcttacaccttaggaatgaaatcgctgcatggagagttctcagcctcggacagctccctcactgacatccaggagacccgcaggcagcctatgcccgaccctggcctgatgcccctgcctgacactgctgcagacttggattggtccaacctggtagatgctgccaaagcctatgaggtccagagagcctcattttttgctgctagtgatgaaaaccatcgccccttgagtgctgcatccaacagtgatcagctggaggaccaggctctggcccagatgaagccttacagcagcagtaaagactcctctcccactctggcttctaaagtggaccagctggaaggtatgctgaagatgcttcgggaagatttgaagaaggaaaaagaagacaaagctcaccttcaggcggaggtgcagcacctgcgagaggacaacctgaggctacaggaggagtcccagaacgcctcggacaagctgaagaagttcacagaatgggtcttcaacaccatagacatgagctagggaaggctgaggaggacaggagaagggcccagacactccctccagtgagtgtcctgcagcccttattccctccatagaaagcatcctcagagcaccttccctggcttcctactctgccccctttcggggagtgcacaacacaatagttgcagatcaacaatcatcacctgccttttgtagaaaagaaaaacaaaaaaagtaaataaaaattttaaacagtaaaataaaagtttaactgctaaaaaaaaaaaaaaaaaaaaaaaaa

SEQ ID NO: 193 - protein, 1804 aa, Homo sapiens
MTSLKRSQTERPLATDRASVVGTDGTPKVHTDDFYMRRFRSQNGSLGSSVMAPVGPPRSEGSHHITSTPGVPKMGVRARIADWPPRKENIKESSRSSQEIETSSCLDSLSSKSSPVSQGSSVSLNSNDSAMLKSIQNTLKNKTRPSENMDSRFLMPEAYPSSPRKALRRIRQRSNSDITISELDVDSFDECISPTYKTGPSLHREYGSTSSIDKQGTSGESFFDLLKGYKDDKSDRGPTPTKLSDFLITGGGKGSGFSLDVIDGPISQRENLRLFKEREKPLKRRSKSETGDSSIFRKLRNAKGEELGKSSDLEDNRSEDSVRPWTCPKCFAHYDVQSILFDLNEAIMNRHNVIKRRNTTTGASAAAVASLVSGPLSHSASFSSPMGSTEDLNSKGSLSMDQGDDKSNELVMSCPYFRNEIGGEGERKISLSKSNSGSFSGCESASFESTLSSHCTNAGVAVLEVPKENLVLHLDRVKRYIVEHVDLGAYYYRKFFYQKEHWNYFGADENLGPVAVSIRREKPDEMKENGSPYNYRIIFRTSELMTLRGSVLEDAIPSTAKHSTARGLPLKEVLEHVVPELNVQCLRLAFNTPKVTEQLMKLDEQGLNYQQKVGIMYCKAGQSTEEEMYNNESAGPAFEEFLQLLGERVRLKGFEKYRAQLDTKTDSTGTHSLYTTYKDYEIMFHVSTMLPYTPNNKQQLLRKRHIGNDIVTIVFQEPGAQPFSPKNIRSHFQHVFVIVRVHNPCSDSVCYSVAVTRSRDVPSFGPPIPKGVTFPKSNVFRDFLLAKVINAENAAHKSEKFRAMATRTRQEYLKDLAEKNVTNTPIDPSGKFPFISLASKKKEKSKPYPGAELSSMGAIVWAVRAEDYNKAMELDCLLGISNEFIVLIEQETKSVVFNCSCRDVIGWTSTDTSLKIFYERGECVSVGSFINIEEIKEIVKRLQFVSKGCESVEMTLRRNGLGQLGFHVNYEGIVADVEPYGYAWQAGLRQGSRLVEICKVAVATLSHEQMIDLLRTSVTVKVVIIPPHDDCTPRRSCSETYRMPVMEYKMNEGVSYEFKFPFRNNNKWQRNASKGPHSPQVPSQVQSPMTSRLNAGKGDGKMPPPERAANIPRSISSDGRPLERRLSPGSDIYVTVSSMALARSQCRNSPSNLSSSSDTGSVGGTYRQKSMPEGFGVSRRSPASIDRQNTQSDIGGSGKSTPSWQRSEDSIADQMAYSYRGPQDFNSFVLEQHEYTEPTCHLPAVSKVLPAFRESPSGRLMRQDPVVHLSPNKQGHSDSHYSSHSSSNTLSSNASSAHSDEKWYDGDRTESELNSYNYLQGTSADSGIDTTSYGPSHGSTASLGAATSSPRSGPGKEKVAPLWHSSSEVISMADRTLETESHGLDRKTESSLSLDIHSKSQAGSTPLTRENSTFSINDAASHTSTMSSRHSASPVVFTSARSSPKEELHPAAPSQLAPSFSSSSSSSSGPRSFYPRQGATSKYLIGWKKPEGTINSVGFMDTRKRHQSDGNEIAHTRLRASTRDLRASPKPTSKSTIEEDLKKLIDLESPTPESQKSFKFHALSSPQSPFPSTPTSRRALHRTLSDESIYNSQREHFFTSRASLLDQALPNDVLFSSTYPSLPKSLPLRRPSYTLGMKSLHGEFSASDSSLTDIQETRRQPMPDPGLMPLPDTAADLDWSNLVDAAKAYEVQRASFFAASDENHRPLSAASNSDQLEDQALAQMKPYSSSKDSSPTLASKVDQLEGMLKMLREDLKKEKEDKAHLQAEVQHLREDNLRLQEESQNASDKLKKFTEWVFNTIDMS

SEQ ID NO: 194 - DNA, 5773 bp, Homo sapiens
gtgaccacggaccaggcagtctctaatgaataggcaaggccacaacctccattctcccagaaaagaagaaatgctcatctgaaattcatcacctctctggagtcttcaaactgaccaagcattgaaaagaacacagtttcagaaaacagtttccagtgcctctggccttcctactgaaagcagacacagagtgcatgaagaccgttcaaatatgtcagggacctcctcccatgagtccttctatgactccctctcagacatgcaggaagaaagcaagaatactgacttcttcccgggcctttctgctttcctcagccaggaagagataaacaagagtcttgacctggcccggagagccatagccgactccgaaacagaagattttgactcggaaaaggagatctcgcagattttcagtacttctcctgcaagcctctgtgaacatccttcccataaggagaccaaattgggtgaacacgcctcgaggagacctcaggataacaggtcaacacctgtccagcctctggcagagaaacaaactaagagtatctcttcacctgtttcaaagaggaaacctgccatgtcacccctgctcaccaggcccagctacatccggagcctccgaaaggctgaaaagcgtggtgcaaaaactcccagcacaaacgtaaagcccaaaacgccacatcaaagaaagggtggcccccagagccagctgtgtgacaaggcagctaatttaattgaggagctaacatccatatttaaagccgcaaagccaagaaacagaagcccaaatggggagtcctcgtcaccagacagtgggtacctgtctcctaaaaatcagccgtcagccctgctgagtgcctcagccagccagagccctatggaagaccaaggggagatggaaagagaggtcaagtcccctggggccaggcattgctaccaggacaaccaggacttggcagtgccacacaaccgcaagtctcacccacagccccacagcgccctccacttcccagctgcacctcgattcatccaaaagctgaggagccaagaagtagcagaagggagccgagtttatctggagtgtagagtcactggaaaccccactcctcgagtcagatggttctgtgaagggaaagaactgcacaacactcctgatattcaaatccactgtgagggaggggacctccataccctgatcatagcagaggcctttgaggacgacacaggtcgctacacctgtttggctacgaatcccagcggctcagacacaacatctgctgaggtgttcattgaaggtgccagttcaacagattctgacagtgaaagtttagctttcaaatcaagagctggagctatgccacaagctcaaaagaaaacaacttctgtttccttgacaataggatcatcatctccaaagacaggggtgaccacagctgtgattcaaccactgtctgtccctgtgcaacaggttcacagtccaacttcatatctctgccgacctgatggaaccactactgcctactttcctcctgtttttacaaaggaactgcaaaacacagccgtggcggaaggccaggtggtggttctggagtgccgggtccgtggggcaccccctctgcaggtccagtggtttcggcaagggagtgaaatccaagactctccagatttccgaattctacagaaaaaacctagatctacagctgaacctgaggagatttgcaccctagttatcgctgagactttccctgaagatgcagggatctttacatgttcagcaagaaatgattatggatcagcaaccagcactgcccagctggttgtcacctcagccaacactgaaaactgtagttacgagtcaatgggagaatccaacaatgaccacttccaacactttccacctccccctccaatcttggagacaagttccttggagttggcttcaaagaaaccatctgagatccagcaggtgaacaaccctgagttaggcctgagcagggcagcccttcaaatgcaattcaatgctgctgagagggaaacgagcggagtccatcccagccgtggagtaaatggactgattaacggcaaagctaacagtaataaatctcttccaacaccagctgtcctgctttcacccactaaggagccaccacctctgcttgccaaaccaaaactaggatttccaaagaaggccagtagaactgctagaatagcctccgatgaggaaattcaaggcacaaaggatgctgttattcaagacctggaacgaaaacttcgcttcaaggaggacctcctgaacaatggccagccgaggttaacatacgaagaaagaatggctcgtcgactgctaggtgctgacagtgcaactgtctttaatattcaggagccagaagaggaaacagctaatcaggaatacaaagtctccagctgtgaacagagactcatcagtgaaatagagtacaggctagaaaggtctcctgtggatgaatcaggtgatgaagttcagtatggagatgtgcctgtggaaaatggaatggcaccattctttgagatgaagctgaaacattacaagatctttgagggaatgccagtaactttcacatgtagagtggctggaaatccaaagccaaagatctattggtttaaagatgggaagcagatctctccaaagagtgatcactacaccattcaaagagatctcgatgggacctgctccctccataccacagcctccaccctagatgatgatgggaattatacaattatggctgcaaaccctcagggccgcatcagttgtactggacggctaatggtacaggctgtcaaccaaagaggtcgaagtccccggtctccctcaggccatcctcatgtcagaaggcctcgttctagatcaagggacagtggagacgaaaatgaaccaattcaggagcgattcttcagacctcacttcttgcaggctcctggagatctgactgttcaagaaggaaaactctgcagaatggactgcaaagtcagtgggttaccaaccccagatctaagctggcaactagatggaaagcccgtacgccctgacagtgctcacaagatgctggtgcgtgagaacggggtgcactctctgatcatagagccagtcacgtcacgtgatgccggcatctacacatgtatagctaccaaccgagcaggacagaactcattcagcctggagcttgtggttgctgctaaagaagcacacaaaccccctgtgtttattgagaagctccaaaacacaggagttgctgatgggtacccagtgcggctggaatgtcgtgtattgggagtgccaccacctcagatattttggaagaaagaaaatgaatcactcactcacagcactgaccgagtgagcatgcaccaggacaaccacggctacatctgcctgctcattcagggagccacaaaagaagatgctgggtggtatactgtgtcagccaagaatgaagcagggattgtgtcctgtactgccaggctggacgtttacatttctcgacattaatagtgaaccacaccaggagaacaaatacccaacccagtggcatcagcagtcacagagcaccaagccaaaaaaagtacggccctcagccagtcgctatgcagcactttcggaccagggactagacatcaaagcagcgttccaacctgaggccaacccatctcacctgacactgaatactgccttggtagaaagtgaggacctgtaatccagcattcttgttaaagctgaaacactgaaacagccattgccttgaccaacatattcctttgtcacattatgtaaaaggcagaaacatacctttgactataagaaattaaaaaaaaacaccaaaataatatttttcttacttgatataccaaacttagtttaagtagataatgctaatacaaatatacacattgcacagaaaatacacatttactgtccaatttaaaactttggaattgctgtgattaaagtgatcaaaatgccaaaatactaaaggaaatcaattgttcacaggtaactacaatttgtattatctacaagtgcctttaaacacaagatataggtgctgtgtagcctgatagtgtgaaatgtttaatgagggagttgtaccacaaacagtactacaatgattctgaagcacagtgtattcagacagatacagtgaaccaagtgcaatatgtaaggatgaaagaagaagagatgacaaagaartccaagtaaatgccttgtctttgcaaatgtttttatattaaatcataaggaaggaactacttgccttaaatgttaatatcaaaagagttttctaacaaggttaataccttagttcttaacattttttttctttatgtgtagtgttttcatgctaccttggtaggaaacttatttacaaaccatattaaaaggctaatttaaatataaataatataaagtgctctgaataaagcagaaatatattacagttcattccacagaaagcatccaaaccacccaaatgaccaaggcatatatagtatttggaggaatcaggggtttggaaggagtagggaggagaatgaaggaaartgcaaccagcatgattatagtgtgttcatttagataaaagtagaaggcacaggagaggtagcaaaggccaggcttttctttggttttcttcaaacataggtgaaaaaaacactgccattcacaagtcaaggaacccagggccagctggaagtgtggagcacacatgctgtggagcacacatgctgtggagattgcagtgtgtctgaggtttgtgtagtagtggaagattttaggtatgtagagcaagttgaaaatggattgagactgcatggtggcataaatgagaaattgcctgtagcatctagtctacttgaaggaagtggagacataaggagagacaaaaacaggtttgtgccataaagtattttttcaaagacaccaagatgtggtaaatgaaaattattagttcacttccctgctgccatgaaactttgccttaagaaggtgctggattccaaggtttgtaaaggcatctcggtaaagactgctttttgaatgcatatgattttgcatcagctagactgagttgattctgaccagacttgatggttttaagtcggaaccgataaattttaaaaaggagaaaaaataatttgacctagtagtataaaacatgaggctttaatggtactttgctatgaaaagaaaacactgtattccttatgcaaaacacatgtatctttcattatttataagtggcctctcttagctcagttactcaattcatacgtaatattttttaaaataattttatatctgtgtaccaccccatatatttcatattactgtttcacatgtacagctttctacttctttgtaagaacaccaaccaaccaaggtttaagtgattaataggcttgagcaccgggtggcagatgttctatgcagtgtggttcaagtttctttgaccgcacttatatgcattgctagtatggaatttaagataccatacacagtctctcatggacctatctctattgtagaattatgacttatgtcttacttggcaaatttttctgaatgtgacctttttttgctgatttgctgggtttgggattaactagcattattttgccacctttatattgtatttataaaaaaaagtactatcaatcaatcatactactttggattgttgtgctggtgtaatgtggatttaacatcaataaatatttgacaaataaaaaaaaa

SEQ ID NO: 195 - protein, 1106 aa, Homo sapiens
MSGTSSHESFYDSLSDMQEESKNTDFFPGLSAFLSQEEINKSLDLARRAIADSETEDFDSEKEISQIFSTSPASLCEHPSHKETKLGEHASRRPQDNRSTPVQPLAEKQTKSISSPVSKRKPAMSPLLTRPSYIRSLRKAEKRGAKTPSTNVKPKTPHQRKGGPQSQLCDKAANLIEELTSIFKAAKPRNRSPNGESSSPDSGYLSPKNQPSALLSASASQSPMEDQGEMEREVKSPGARHCYQDNQDLAVPHNRKSHPQPHSALHFPAAPRFIQKLRSQEVAEGSRVYLECRVTGNPTPRVRWFCEGKELHNTPDIQIHCEGGDLHTLIIAEAFEDDTGRYTCLATNPSGSDTTSAEVFIEGASSTDSDSESLAFKSRAGAMPQAQKKTTSVSLTIGSSSPKTGVTTAVIQPLSVPVQQVHSPTSYLCRPDGTTTAYFPPVFTKELQNTAVAEGQVVVLECRVRGAPPLQVQWFRQGSEIQDSPDFRILQKKPRSTAEPEEICTLVIAETFPEDAGIFTCSARNDYGSATSTAQLVVTSANTENCSYESMGESNNDHFQHFPPPPPILETSSLELASKKPSEIQQVNNPELGLSRAALQMQFNAAERETSGVHPSRGVNGLINGKANSNKSLPTPAVLLSPTKEPPPLLAKPKLGFPKKASRTARIASDEEIQGTKDAVIQDLERKLRFKEDLLNNGQPRLTYEERMARRLLGADSATVFNIQEPEEETANQEYKVSSCEQRLISEIEYRLERSPVDESGDEVQYGDVPVENGMAPFFEMKLKHYKIFEGMPVTFTCRVAGNPKPKIYWFKDGKQISPKSDHYTIQRDLDGTCSLHTTASTLDDDGNYTIMAANPQGRISCTGRLMVQAVNQRGRSPRSPSGHPHVRRPRSRSRDSGDENEPIQERFFRPHFLQAPGDLTVQEGKLCRMDCKVSGLPTPDLSWQLDGKPVRPDSAHKMLVRENGVHSLIIEPVTSRDAGIYTCIATNRAGQNSFSLELVVAAKEAHKPPVFIEKLQNTGVADGYPVRLECRVLGVPPPQIFWKKENESLTHSTDRVSMHQDNHGYICLLIQGATKEDAGWYTVSAKNEAGIVSCTARLDVYISRH

SEQ ID NO: 196 - DNA, 1398 bp, Homo sapiens
cccagccggtccaggcctctggcgaacatggcgcttgtcccctgccaggtgctgcggatggcaatcctgctgtcctactgctctatcctgtgtaactacaaggccatcgaaatgccctcacaccagacctacggagggagctggaaattcctgacgttcattgatctggttatccaggctgtcttttttggcatctgtgtgctgactgatctttccagtcttctgactcgaggaattgggaaccaggagcaagagaggcagctcaagaagctcatctctctccgggactggatgttagctgtgttggcctttcctgttggggtttttgttgtagcagtgttctggatcatttatgcctatgacagagagatgatatacccgaagctgctggataattttatcccagggtggctgaatcacggaatgcacacgacggttctgccctttatattaatcgagatgaggacatcgcaccatcagtatcccagcaggagcagcggacttaccgccatatgtaccttctctgttggctatatattatgggtgtgctgggtgcatcatgtaactggcatgtgggtgtaccctttcctggaacacattggcccaggagccagaatcatcttctttgggtctacaaccatcttaatgaacttcctgtacctgctgggagaagttctgaacaactatatctgggatacacagaaaagtatggaagaagagaaagaaaagcctaaattggaatgagatccaagtctaaacgcaagagctagattgagccgccattgaagactccttcccctcgggcattggcagtgggggagaaaaggcttcaaaggaacttggtggcatcagcacccccctcccccaatgaggacaccttttatatataaatatgtataaacatagaatacagttgtttccaaaagaactcaccctcactgtgtgttaaagaattcttcccaaagtcattactgataataacattttttccttttctagttttaaaaccagaattggaccttggatttttattttggcaattgtaactccatctaatcaagaaagaataaaagtttattgcacttctttttgagaaatatgttaaagtcaaaggggcatatatagagtaaggcttttgtgtatttaatcctaaaggtggctgtaatcatgaacctaggccaccatggggacctgagagggaaggggacagatgtttctcattgcataatgtcacagttgcctcaaatgagcaccatttgtaataatgatgtcaatttcatgaaaagcctgagtgtattgcatctcttgatttaatcatgtgaaacttttcctagatgcaaatgctgactaataaagacaaagccaccctgaaaaaaaaaaaaaaaaaaaaaaaaaaaa

SEQ ID NO: 197 - protein, 238 aa, Homo sapiens
MALVPCQVLRMAILLSYCSILCNYKAIEMPSHQTYGGSWKFLTFIDLVIQAVFFGICVLTDLSSLLTRGIGNQEQERQLKKLISLRDWMLAVLAFPVGVFVVAVFWIIYAYDREMIYPKLLDNFIPGWLNHGMHTTVLPFILIEMRTSHHQYPSRSSGLTAICTFSVGYILWVCWVHHVTGMWVYPFLEHIGPGARIIFFGSTTILMNFLYLLGEVLNNYIWDTQKSMEEEKEKPKLE

SEQ ID NO: 198 - DNA, 1002 bp, Homo sapiens
tgcagtctgtctgagggcggccgaagtggctggctcatttaagatgaggcttctgctgcttctcctagtggcggcgtctgcgatggtccggagcgaggcctcggccaatctgggcggcgtgccagcaagagattaaagatgcagtacgccacggggccgctgctcaagttccagatttgtgtttcctgaggttataggcgggtgtttgaggagtacatgcgggttattagccagcggtacccagacatccgcattgaaggagagaattacctccctcaaccaatatatagacacatagcatctttcctgtcagtcttcaaactagtattaataggcttaataattgttggcaaggatccttttgctttctttggcatgcaagctcctagcatctggcagtggggccaagaaaataaggtttatgcatgtatgatggttttcttcttgagcaacatgattgagaaccagtgtatgtcaacaggtgcatttgagataactttaaatgatgtacctgtgtggtctaagctggaatctggtcaccttccatccatgcaacaacttgttcaaattcttgacaatgaaatgaagctcaatgtgcatatggattcaatcccacaccatcgatcatagcaccacctatcagcactgaaaactcttttgcattaagggatcattgcaagagcagcgtgactgacattatgaaggcctgtactgaagacagcaagctgttagtacagaccagatgctttcttggcaggctcgttgtacctcttggaaaacctcaatgcaagatagtgtttcagtgctggcatattttggaattctgcacattcatggagtgcaataatactgtatagctttcccccacctcccacaaaatcacccagttaatgtgtgtgtgtgtgttttttttaaggtaaacattactacttgtaactttttttctttagtcatatttggaaaaagtagaaaattggagttacatttggattttttttccaa

SEQ ID NO: 199 - protein, 163 aa, Homo sapiens
  Unsure 17: Unknown amino acid
MQYATGPLLKFQICVSXGYRRVFEEYMRVISQRYPDIRIEGENYLPQPIYRHIASFLSVFKLVLIGLIIVGKDPFAFFGMQAPSIWQWGQENKVYACMMVFFLSNMIENQCMSTGAFEITLNDVPVWSKLESGHLPSMQQLVQILDNEMKLNVHMDSIPHHRS

SEQ ID NO: 200 - DNA, 5601 bp, Homo sapiens
ggcccggctgcgaggaggaggcggcggcggcgcaggaggatgtacttggtggcgggggacagggggttggccggctgcgggcacctcctggtctcgctgctggggctgctgctgctgctggcgcgctccggcacccgggcgctggtctgcctgccctgtgacgagtccaagtgcgaggagcccaggaactgcccggggagcatcgtgcagggcgtctgcggctgctgctacacgtgcgccagccagaggaacgagagctgcggcggcaccttcgggatttacggaacctgcgaccgggggctgcgttgtgtcatccgccccccgctcaatggcgactccctcaccgagtacgaagcgggcgtttgcgaagatgagaactggactgatgaccaactgcttggttttaaaccatgcaatgaaaaccttattgctggctgcaatataatcaatgggaaatgtgaatgtaacaccattcgaacctgcagcaatccctttgagtttccaagtcaggatatgtgcctttcagctttaaagagaattgaagaagagaagccagattgctccaaggcccgctgtgaagtccagttctctccacgttgtcctgaagattctgttctgatcgagggttatgctcctcctggggagtgctgtcccttacccagccgctgcgtgtgcaaccccgcaggctgtctgcgcaaagtctgccagccgggaaacctgaacatactagtgtcaaaagcctcagggaagccgggagagtgctgtgacctctatgagtgcaaaccagttttcggcgtggactgcaggactgtggaatgccctcctgttcagcagaccgcgtgtcccccggacagctatgaaactcaagtcagactaactgcagatggttgctgtactttgccaacaagatgcgagtgtctctctggcttatgtggtttccccgtgtgtgaggtgggatccactccccgcatagtctctcgtggcgatgggacacctggaaagtgctgtgatgtctttgaatgtgttaatgatacaaagccagcctgcgtatttaacaatgtggaatattatgatggagacatgtttcgaatggacaactgtcggttctgtcgatgccaagggggcgttgccatctgcttcactgcccagtgtggtgagataaactgcgagaggtactacgtgcccgaaggagagtgctgcccagtgtgtgaagatccagtgtatccttttaataatcccgctggctgctatgccaatggcctgatccttgcccacggagaccggtggcgggaagacgactgcacattctgccagtgcgtcaacggtgaacgccactgcgttgcgaccgtctgcggacagacctgcacaaaccctgtgaaagtgcctggggagtgttgccctgtgtgcgaagaaccaaccatcatcacagttgatccacctgcatgtggggagttatcaaactgcactctgacagggaaggactgcattaatggtttcaaacgcgatcacaatggttgtcggacctgtcagtgcataaacaccgaggaactatgttcagaacgtaaacaaggctgcaccttgaactgtcccttcggtttccttactgatgcccaaaactgtgagatctgtgagtgccgcccaaggcccaagaagtgcagacccataatctgtgacaagtattgtccacttggattgctgaagaataagcacggctgtgacatctgtcgctgtaagaaatgtccagagctctcatgcagtaagatctgccccttgggtttccagcaggacagtcacggctgtcttatctgcaagtgcagagaggcctctgcttcagctgggccacccatcctgtcgggcacttgtctcaccgtggatggtcatcatcataaaaatgaggagagctggcacgatgggtgccgggaatgctactgtctcaatggacgggaaatgtgtgccctgatcacctgcccggtgcctgcctgtggcaaccccaccattcaccctggacagtgctgcccatcatgtgcagatgactttgtggtgcagaagccagagctcagtactccctccatttgccacgcccctggaggagaatactttgtggaaggagaaacgtggaacattgactcctgtactcagtgcacctgccacagcggacgggtgctgtgtgagacagaggtgtgcccaccgctgctctgccagaacccctcacgcacccaggattcctgctgcccacagtgtacagatcaaccttttcggccttccttgtcccgcaataacagcgtacctaattactgcaaaaatgatgaaggggatatattcctggcagctgagtcctggaagcctgacgtttgtaccagctgcatctgcattgatagcgtaattagctgtttctctgagtcctgcccttctgtatcctgtgaaagacctgtcttgagaaaaggccagtgttgtccctactgcatagaagacacaattccaaagaaggtggtgtgccacttcagtgggaaggcctatgccgacgaggagcggtgggaccttgacagctgcacccactgctactgcctgcagggccagaccctctgctcgaccgtcagctgcccccctctgccctgtgttgagcccatcaacgtggaaggaagttgctgcccaatgtgtccagaaatgtatgtcccagaaccaaccaatatacccattgagaagacaaaccatcgaggagaggttgacctggaggttcccctgtggcccacgcctagtgaaaatgatatcgtccatctccctagagatatgggtcacctccaggtagattacagagataacaggctgcacccaagtgaagattcttcactggactccattgcctcagttgtggttcccataattatatgcctctctattataatagcattcctattcatcaatcagaagaaacagtggataccactgctttgctggtatcgaacaccaactaagccttcttccttaaataatcagctagtatctgtggactgcaagaaaggaaccagagtccaggtggacagttcccagagaatgctaagaattgcagaaccagatgcaagattcagtggcttctacagcatgcaaaaacagaaccatctacaggcagacaatttctaccaaacagtgtgaagaaaggcaactaggatgaggtttcaaaagacggaagacgactaaatctgctctaaaaagtaaactagaatttgtgcacttgcttagtggattgtattggattgtgacttgatgtacagcgctaagaccttactgggatgggctctgtctacagcaatgtgcagaacaagcattcccacttttcctcaagataactgaccaagtgttttcttagaaccaaagtttttaaagttgctaagatatatttgcctgtaagatagctgtagagatatttggggtggggacagtgagtttggatggggaaatgggtgggagggtggtgttgggaagaaaaattggtcagcttggctcggggagaaacctggtaacataaaagcagttcagtggcccagaggttatttttttcctattgctctgaagactgcactggttgctgcaaagctcaggcctgaatgagcaggaaacaaaaaaggccttgcgacccagctgccataaccaccttagaactaccagacgagcacatcagaaccctttgacagccatcccaggtctaaagccacaagtttcttttctatacagtcacaactgcagtaggcagtgaggaagccagagaaatgcgatagcggcatttctctaaagcgggttattaaggatatatacagttacactttttgctgcttttattttcttccaagccaatcaatcagccagttcctagcagagtcagcacatgaacaagatctaagtcatttcttgatgtgagcactggagcttttttttttttacaacgtgacaggaagaggagggagagggtgacgaacaccaggcatttccaggggctatatttcactgtttgttgttgctttgttctgttatattgttggttgttcatagtttttgttgaagctctagcttaagaagaaactttttttaaaaagactgtttggggattctttttccttattatatactgattctacaaaatagaaactacttcattttaattgtatattattcaagcacctttgttgaagctcaaaaaaaatgatgcctctttaaactttagcaattataggagtatttatgtaactatcttatgcttcaaaaaacaaaagtatttgtgtgcatgtgtatataatatatatatatacatatatatttatacacatacaatttatgttttcctgttgaatgtatttttatgagattttaaccagaacaaaggcagataaacaggcattccatagcagtgcttttgatcacttacaaattttttgaataacacaaaatctcattctacctgcagtttaattggaaagatgtgtgtgtgagagtatgtatgtgtgtgtgtgtgtgtgtgtgtgtgcgcgcgcacgcacgccttgagcagtcagcattgcacctgctatggagaagggtattcctttattaaaatcttcctcatttggatttgctttcagttggttttcaatttgctcactggccagagacattgatggcagttcttatctgcatcactaatcagctcctggattttttttttttttttttcaaacaatggtttgaaacaactactggaatattgtccacaataagctggaagtttgttgtagtatgcctcaaatataactgactgtatactatagtggtaacttttcaaacagcccttagcacttttatactaattaacccatttgtgcattgagttttcttttaaaaatgcttgttgtgaaagacacagatacccagtatgcttaacgtgaaaagaaaatgtgttctgttttgtaaaggaactttcaagtattgttgtaaatacttggacagaggttgctgaactttaaaaaaaattaatttattattataatgacctaatttattaatctgaagattaaccatttttttgtcttagaatatcaaaaagaaaaagaaaaaggtgttctagctgtttgcatcaaaggaaaaaaagatttattatcaaggggcaatatttttatcttttccaaaataaatttgttaatgatacattacaaaaatagattgacatcagcctgattagtataaattttgttggtaattaatccattcctggcataaaaagtctttatcaaaaaaaattgtagatgcttgctttttgttttttcaatcatggccatattatgaaaatactaacaggatataggacaaggtgtaaatttttttattattattttaaagatatgatttatcctgagtgctgtatctattactcttttactttggttcctgttgtgctcttgtaaaagaaaaatataatttcctgaagaataaaatagatatatggcacttggagtgcatcatagttctacagtttgtttttgttttcttcaaaaaagctgtaagagaattatctgcaacttgattcttggcaggaaataaacattttgagttgaaatcaaaaaaaaaaaaaaaaaa

SEQ ID NO: 201 - protein, 1036 aa, Homo sapiens
MYLVAGDRGLAGCGHLLVSLLGLLLLLARSGTRALVCLPCDESKCEEPRNCPGSIVQGVCGCCYTCASQRNESCGGTFGIYGTCDRGLRCVIRPPLNGDSLTEYEAGVCEDENWTDDQLLGFKPCNENLIAGCNIINGKCECNTIRTCSNPFEFPSQDMCLSALKRIEEEKPDCSKARCEVQFSPRCPEDSVLIEGYAPPGECCPLPSRCVCNPAGCLRKVCQPGNLNILVSKASGKPGECCDLYECKPVFGVDCRTVECPPVQQTACPPDSYETQVRLTADGCCTLPTRCECLSGLCGFPVCEVGSTPRIVSRGDGTPGKCCDVFECVNDTKPACVFNNVEYYDGDMFRMDNCRFCRCQGGVAICFTAQCGEINCERYYVPEGECCPVCEDPVYPFNNPAGCYANGLILAHGDRWREDDCTFCQCVNGERHCVATVCGQTCTNPVKVPGECCPVCEEPTIITVDPPACGELSNCTLTGKDCINGFKRDHNGCRTCQCINTEELCSERKQGCTLNCPFGFLTDAQNCEICECRPRPKKCRPIICDKYCPLGLLKNKHGCDICRCKKCPELSCSKICPLGFQQDSHGCLICKCREASASAGPPILSGTCLTVDGHHHKNEESWHDGCRECYCLNGREMCALITCPVPACGNPTIHPGQCCPSCADDFVVQKPELSTPSICHAPGGEYFVEGETWNIDSCTQCTCHSGRVLCETEVCPPLLCQNPSRTQDSCCPQCTDQPFRPSLSRNNSVPNYCKNDEGDIFLAAESWKPDVCTSCICIDSVISCFSESCPSVSCERPVLRKGQCCPYCIEDTIPKKVVCHFSGKAYADEERWDLDSCTHCYCLQGQTLCSTVSCPPLPCVEPINVEGSCCPMCPEMYVPEPTNIPIEKTNHRGEVDLEVPLWPTPSENDIVHLPRDMGHLQVDYRDNRLHPSEDSSLDSIASVVVPIIICLSIIIAFLFINQKKQWIPLLCWYRTPTKPSSLNNQLVSVDCKKGTRVQVDSSQRMLRIAEPDARFSGFYSMQKQNHLQADNFYQTV

SEQ ID NO: 202 - DNA, 3200 bp, Homo sapiens
gagctgcgaaagggcgggaaaggcagttggagaagaggtaagcggttactcactccatggctgcagcaaggagaggcggcggcggcctcggctgaagaaagaaggtgggagcggagagcgcaggcgtgaaatcttcccaaggctgcagacaccgacggatttgctttgggagccagagtagctgccgccaccagagtccggagccatgagcgggtttaattttggaggcactggggcccctacaggcgggttcacgtttggcactgcaaagacggcaacaaccacacctgctacagggttttctttctccacctctggcactggagggtttaattttggggctcccttccaaccagccacaagtaccccttccaccggcctgttctcacttgccacccagactccggccacacagacgacaggcttcacttttggaacagcgactcttgcttcggggggaactggattttctttggggatcggtgcttcaaagctcaacttgagcaacacagctgccaccccagccatggcaaaccccagcggctttgggctgggcagcagcaacctcactaatgccatatcgagcaccgtcacctccagccagggcacagcacccaccggctttgtgtttggcccctccaccacctctgtggctccagctaccacatctggaggcttctcattcactggtggaagcacggcccaaccctccggtttcaacattggctcagcagggaattcagcccagcccacggcacctgccacgttgcccttcactccggccacgccagcagccaccacagcaggtgccacacagccagctgctcccacacccacagccaccatcaccagtactgggcccagcctctttgcgtcaatagcaactgctccaacctcatctgccaccactggactctccctctgtacccctgtgaccacagcgggcgcccccactgctgggacacagggcttcagcttaaaggcacctggagcagcttccggcacctccacaacaacatccaccgctgccaccgccaccgccaccaccaccaccagcagcagcaccaccggctttgccttgaatttaaaaccactggcgccagccgggatccccagcaatacagcagctgccgtgaccgctccacctggccctggcgcagctgcaggggcggctgccagctccgccatgacctacgcgcagctggagagcctgatcaacaaatggagcctggagctagaggaccaggagcggcacttcctccagcaggccacccaggtcaacgcctgggaccgcacgctgatcgagaatggagaaaagatcaccagcctgcaccgcgaggtggagaaggtgaagctggaccagaagaggctggaccaggagctcgacttcatcctgtcccagcagaaggagctggaagacctgctgagcccactggaggagttggtcaaggagcagagcgggaccatctacctgcagcacgcggatgaggagcgtgagaaaacctacaagctggctgagaacatcgacgcacagctcaagcgcatggcccaggatctcaaggacatcatcgagcacctgaacacgtccggggcccccgccgacaccagtgacccactgcagcagatctgcaagatcctcaatgcgcacatggactcactgcagtggatcgaccagaactcggccctgctgcagaggaaggtggaggaggtgaccaaggtgtgcgagggccggcgcaaggagcaggagcgcagcttccggatcacctttgactgagcgacagcagccctggggcccgcaggtccctagggagttcatgaggggaatgcgccctgttgtctgtagtttggggttgtggcaagatacttgtttgtttgtttctttctttcacatgactgcccttgacatgatcgctgtgtgctttgcgtttttccatttaggagggtattctgggccttctgcccaggcagcagcctcatgggtgtggcttctgtggctttcatttgagtatctttggccccttttcacctactgcgaccacccacctcatcctggctcagcctggtgatggagaagtgctgatggtcttggtcccagccagggtcgtgggggcagccactctctccaaagcatagtcatgggtgtcatgaaaaaataccaaatgtaagagaacctccaagtcagggcgcagtggctcacccctgtaatctcagcactttgggtggccaaggcgggcagatgacttgaggtcaggagttcgagaccagcctggccaacatggtgaaaccccgtctctactaaaaatacaaaaattagtcaggtgtggtggacgcctgtgatctcaatctcagctactcgggaggctgaggcaggagaatcacttgaacccaggaggtgttgcagtgaaccaagatcacaccactgcactccagcctaggcaacagagactctgtctcaaaaaaaaaaaaaaaaaaaagaaactcccaggagacagcagcctagttttcgagtgtgagcttgtgcttgtgaaagctaaccatgctaaccaccaaggcaaagcagcacagtgtgaatagaacagagcgggatcaagaatttcacagaagacaggtcagctgaggggcctgcacacacagggtgttgaggaaccacagatgggcgccgagaggcctgccttttgcctggcccaggctcacccccaccttgggcctcacctcctctaggaagccttcccagctacccgaagctcaggtggccttcttgcaggtccccgtagcaccctgagcctgtaccttgggtggcacttgttatgctatcctgtgctagccgtttgtgcctcgtctcgctgttagattgtgagttcccatgggcagagacccactgtcgttccccgtgtgtccccagcccggtccctgtcacatttgttaaatgaaagaacaatgaagcccagtgtaacgtcagtccacagaaatagccacagcttccagtggtggccgtagacttggctcggaacttagtggcaccagagtaactctagtcagttacagtaaaatccactgtgtgtggaaggcagaagctagcggttgtatcccaagcatcttttgtatttgtctttatactttgctgaattctctgaaatacctattactgtatgtggcttttctaaataaatgtattgtgaaactaaaaaaaaaaaaaaaaa

SEQ ID NO: 203 - protein, 522 aa, Homo sapiens [sequence omitted]

SEQ ID NO: 204 - DNA, 3418 bp, Homo sapiens
actccagatataggatcactccatgccatcaagaaagttgatgctattgggcccatctcaagctgatcttggcacctctcatgctctgctctcttcaaccagacctctacattccattttggaagaagactaaaaatggtgtttccaatgtggacactgaagagacaaattcttatcctttttaacataatcctaatttccaaactccttggggctagatggtttcctaaaactctgccctgtgatgtcactctggatgttccaaagaaccatgtgatcgtggactgcacagacaagcatttgacagaaattcctggaggtattcccacgaacaccacgaacctcaccctcaccattaaccacataccagacatctccccagcgtcctttcacagactggaccatctggtagagatcgatttcagatgcaactgtgtacctattccactggggtcaaaaaacaacatgtgcatcaagaggctgcagattaaacccagaagctttagtggactcacttatttaaaatccctttacctggatggaaaccagctactagagataccgcagggcctcccgcctagcttacagcttctcagccttgaggccaacaacatcttttccatcagaaaagagaatctaacagaactggccaacatagaaatactctacctgggccaaaactgttattatcgaaatccttgttatgtttcatattcaatagagaaagatgccttcctaaacttgacaaagttaaaagtgctctccctgaaagataacaatgtcacagccgtccctactgttttgccatctactttaacagaactatatctctacaacaacatgattgcaaaaatccaagaagatgattttaataacctcaaccaattacaaattcttgacctaagtggaaattgccctcgttgttataatgccccatttccttgtgcgccgtgtaaaaataattctcccctacagatccctgtaaatgcttttgatgcgctgacagaattaaaagttttacgtctacacagtaactctcttcagcatgtgcccccaagatggtttaagaacatcaacaaactccaggaactggatctgtcccaaaacttcttggccaaagaaattggggatgctaaatttctgcattttctccccagcctcatccaattggatctgtctttcaattttgaacttcaggtctatcgtgcatctatgaatctatcacaagcattttcttcactgaaaagcctgaaaattctgcggatcagaggatatgtctttaaagagttgaaaagctttaacctctcgccattacataatcttcaaaatcttgaagttcttgatcttggcactaactttataaaaattgctaacctcagcatgtttaaacaatttaaaagactgaaagtcatagatctttcagtgaataaaatatcaccttcaggagattcaagtgaagttggcttctgctcaaatgccagaacttctgtagaaagttatgaaccccaggtcctggaacaattacattatttcagatatgataagtatgcaaggagttgcagattcaaaaacaaagaggcttctttcatgtctgttaatgaaagctgctacaagtatgggcagaccttggatctaagtaaaaatagtatattttttgtcaagtcctctgattttcagcatctttctttcctcaaatgcctgaatctgtcaggaaatctcattagccaaactcttaatggcagtgaattccaacctttagcagagctgagatatttggacttctccaacaaccggcttgatttactccattcaacagcatttgaagagcttcacaaactggaagttctggatataagcagtaatagccattattttcaatcagaaggaattactcatatgctaaactttaccaagaacctaaaggttctgcagaaactgatgatgaacgacaatgacatctcttcctccaccagcaggaccatggagagtgagtctcttagaactctggaattcagaggaaatcacttagatgttttatggagagaaggtgataacagatacttacaattattcaagaatctgctaaaattagaggaattagacatctctaaaaattccctaagtttcttgccttctggagtttttgatggtatgcctccaaatctaaagaatctctctttggccaaaaatgggctcaaatctttcagttggaagaaactccagtgtctaaagaacctggaaactttggacctcagccacaaccaactgaccactgtccctgagagattatccaactgttccagaagcctcaagaatctgattcttaagaataatcaaatcaggagtctgacgaagtattttctacaagatgccttccagttgcgatatctggatctcagctcaaataaaatccagatgatccaaaagaccagcttcccagaaaatgtcctcaacaatctgaagatgttgcttttgcatcataatcggtttctgtgcacctgtgatgctgtgtggtttgtctggtgggttaaccatacggaggtgactattccttacctggccacagatgtgacttgtgtggggccaggagcacacaagggccaaagtgtgatctccctggatctgtacacctgtgagttagatctgactaacctgattctgttctcactttccatatctgtatctctctttctcatggtgatgatgacagcaagtcacctctatttctgggatgtgtggtatatttaccatttctgtaaggccaagataaaggggtatcagcgtctaatatcaccagactgttgctatgatgcttttattgtgtatgacactaaagacccagctgtgaccgagtgggttttggctgagctggtggccaaactggaagacccaagagagaaacattttaatttatgtctcgaggaaagggactggttaccagggcagccagttctggaaaacctttcccagagcatacagcttagcaaaaagacagtgtttgtgatgacagacaagtatgcaaagactgaaaattttaagatagcattttacttgtcccatcagaggctcatggatgaaaaagttgatgtgattatcttgatatttcttgagaagccctttcagaagtccaagttcctccagctccggaaaaggctctgtgggagttctgtccttgagtggccaacaaacccgcaagctcacccatacttctggcagtgtctaaagaacgccctggccacagacaatcatgtggcctatagtcaggtgttcaaggaaacggtctagcccttctttgcaaaacacaactgcctagtttaccaaggagaggcctggctgtttaaattgttttcatatatatcacaccaaaagcgtgttttgaaattcttcaagaaatgagattgcccatatttcaggggag

SEQ ID NO: 205 - protein, 1049 aa, Homo sapiens
MVFPMWTLKRQILILFNIILISKLLGARWFPKTLPCDVTLDVPKNHVIVDCTDKHLTEIPGGIPTNTTNLTLTINHIPDISPASFHRLDHLVEIDFRCNCVPIPLGSKNNMCIKRLQIKPRSFSGLTYLKSLYLDGNQLLEIPQGLPPSLQLLSLEANNIFSIRKENLTELANIEILYLGQNCYYRNPCYVSYSIEKDAFLNLTKLKVLSLKDNNVTAVPTVLPSTLTELYLYNNMIAKIQEDDFNNLNQLQILDLSGNCPRCYNAPFPCAPCKNNSPLQIPVNAFDALTELKVLRLHSNSLQHVPPRWFKNINKLQELDLSQNFLAKEIGDAKFLHFLPSLIQLDLSFNFELQVYRASMNLSQAFSSLKSLKILRIRGYVFKELKSFNLSPLHNLQNLEVLDLGTNFIKIANLSMFKQFKRLKVIDLSVNKISPSGDSSEVGFCSNARTSVESYEPQVLEQLHYFRYDKYARSCRFKNKEASFMSVNESCYKYGQTLDLSKNSIFFVKSSDFQHLSFLKCLNLSGNLISQTLNGSEFQPLAELRYLDFSNNRLDLLHSTAFEELHKLEVLDISSNSHYFQSEGITHMLNFTKNLKVLQKLMMNDNDISSSTSRTMESESLRTLEFRGNHLDVLWREGDNRYLQLFKNLLKLEELDISKNSLSFLPSGVFDGMPPNLKNLSLAKNGLKSFSWKKLQCLKNLETLDLSHNQLTTVPERLSNCSRSLKNLILKNNQIRSLTKYFLQDAFQLRYLDLSSNKIQMIQKTSFPENVLNNLKMLLLHHNRFLCTCDAVWFVWWVNHTEVTIPYLATDVTCVGPGAHKGQSVISLDLYTCELDLTNLILFSLSISVSLFLMVMMTASHLYFWDVWYIYHFCKAKIKGYQRLISPDCCYDAFIVYDTKDPAVTEWVLAELVAKLEDPREKHFNLCLEERDWLPGQPVLENLSQSIQLSKKTVFVMTDKYAKTENFKIAFYLSHQRLMDEKVDVIILIFLEKPFQKSKFLQLRKRLCGSSVLEWPTNPQAHPYFWQCLKNALATDNHVAYSQVFKETV

SEQ ID NO: 206 - DNA, 2046 bp, Homo sapiens
ggcacgagggttcggtgggctccaggcgtcgcgatggaggagagcgggtacgagtcggtgctctgtgtcaagcctgacgtccacgtctaccgcatccctccgcgggctaccaaccgtggctacagggctgcggagtggcagctggaccagccatcatggagtggccggctgaggatcactgcaaagggacagatggcctacatcaagctggaggacaggacgtcaggggagctctttgctcaggccccggtggatcagtttcctggcacagctgtggagagtgtgacggattccagcaggtacttcgtgatccgcatcgaagatggaaatgggcgacgggcgtttattggaattggcttcggggaccgaggtgatgcctttgacttcaatgttgcattgcaggaccatttcaagtgggtgaaacagcagtgtgaatttgcaaaacaagcccagaacccagaccaaggccctaaactggacctgggcttcaaggagggccagaccatcaagctcaacatcgcaaacatgaagaagaaggaaggagcagctgggaatccccgagtccggcctgccagcacaggagggctgagcctgcttccccctcccccaggggggaaaacctccaccctgatccctccccctggggagcagttggctgtggggggatccctcgtccagccagcagttgctcccagttcaggaggtgctcctgtaccctggccacagcccaatcctgccactgctgacatctggggagactttaccaaatctacaggatcaacttccagccagacccagccaggcacaggctgggtccagttctgacctgagcacggtttttcctcatgtgacttctgggaaggcgctccctcatctgggccaaaggaaggaggacgaagccctcctcagctggcctgtgtttggggcatgaatctctcctctcctccttgtctggctctgttgacaaaccgggcatgtttggcagtaaattggcaccgtgtcacactgtttcctgggattcaagtatgcaaccagaacacaggagaagaaaagctccaggatccctgtccccatctgtcctcttgatgtgagagagactctgagacttcttccatcgcaatgacctgtattaaacacaagccccccaagcaaaagaagaggttgagtttgctgccaggattcagatcagcccttcccagggtctgcaggtgtcacatgatcacagttcagcgggaggctttccgtacccacactggctgtagccacttcagtccatctgccctccagaggaggggtttcttcctgatttttagcaggtttagaggctgcagcttgagctacaatcaggagggaaattggaaggattagcagcttttaaaaatgtttaaatattttgctttgctaatgtgctgatccgcactaactcatctttgcaaaaggaactgctccctcggcgtgccccagctggggcctctgaagggattcctcactgtgggcagctgccctgagcttcaggcagcagtgttcatctctggccagttgtctggtttccatgtattctaggccaggtaggcaacacagagccaaggcgggtgctggaagccagacggaacagtgttggggcaggaaggtggatgctgttgtcatggagctgtgggagttggcactctgtctgctggtggccctctcggctcacatgttcacagtgcagctcctggcagacttgggttttctctttggtggtttctaaagtgccttatctgcaaacaacttcttttctccttcaggaactgtgaatggctagaagaaggagctcagtaaactagaagtccagggttgcttggtttactggtttataagaaatctgaaagcacctctgacattccttttattaactcacctctcagttgaaagatttcttctttgaaaggtcaagaccgtgaactgaaaaaagtgttggcctttttgcgggaccagatttttaagataaaataaatatttttacttctgtcaaaaaaaaaaaaaaaaaaaaaaaaaaaaaaaaaa

SEQ ID NO: 207 - protein, 263 aa, Homo sapiens
MEESGYESVLCVKPDVHVYRIPPRATNRGYRAAEWQLDQPSWSGRLRITAKGQMAYIKLEDRTSGELFAQAPVDQFPGTAVESVTDSSRYFVIRIEDGNGRRAFIGIGFGDRGDAFDFNVALQDHFKWVKQQCEFAKQAQNPDQGPKLDLGFKEGQTIKLNIANMKKKEGAAGNPRVRPASTGGLSLLPPPPGGKTSTLIPPPGEQLAVGGSLVQPAVAPSSGGAPVPWPQPNPATADIWGDFTKSTGSTSSQTQPGTGWVQF

SEQ ID NO: 208 - DNA, 1680 bp, Homo sapiens
agagagctgtttactaggcacgactgcgaaggcaagggggcaccagctcaggactgcatctgcctgccatttcccttccactcctcctttctggagtctgacattagaaagccagcgagaaggaagattcaaacaaccaaccctgatttcctgcttctccttttcatgagtgttcctgtggtctctgcacctcctttctgtcccccggcagagggcagtagagatggccggcccaaggcctcggtggcgcgaccagctgctgttcatgagcatcatagtcctcgtgattgtggtcatctgcctgatgttatacgctcttctctgggaggctggcaacctcactgacctgcccaacctgagaatcggcttctataacttctgcctgtggaatgaggacaccagcaccctacagtgtcaccagttccctgagctggaagccctgggggtgcctcgggttggcctgggcctggccaggcttggcgtgtacgggtccctggtcctcaccctctttgccccccagcctctcctcctagcccagtgcaacagtgatgagagagcgtggcggctggcagtgggcttcctggctgtgtcctctgtgctgctggcaggcggcctgggcctcttcctctcctatgtgtggaagtgggtcaggctctccctcccggggcctgggtttctagctctgggcagcgcccaggccttactcatcctcttgcttatagccatggctgtgttccctctgagggctgagagggctgagagcaagcttgagagctgctaaaggcttacgtgattgcaagggttcagttccaaccatagtcagaggtggcacatctgctcagccatctcattttacagctaacgctgatctccagctccagcgatggaacccactacagaggaggtggggcccctgtgtcaaagaggccgaggggcagcaagggcagccagggcacctgtgacttcttagtacaagattgtctgtccttcaggacttccaaggctcccaaagactccctaaaccatgcagctcattgtcacaccaattcctgctttaattaatggatctgagcaaatcttcctctagcttcaggagggtggggagggagtgattgccgtcatggggccagacttccaggctgatttgccaaatgccaaaatgaaacctagcaaagaacttacggcaacaaacgaggacattaaaagagcgagcacctcagtgtctctggggacatggttaaggagcttccactcagcccaccatagtgagtgggccgccataagccatcactggaactccaaccccagaggtccaggagtgatctctgagtgactcaacaaagacaggacacatggggtacaaagacaaggcttgactgcttcaaagcttccctggacctgaagccagacagggcagaggcgtccgctgacaaatcactcccatgatgagaccctggaggactccaaatcctcgctgtgaacaggactggacggttgcgcacaaacaaacgctgccaccctccacttcccaacccagaacttggaaagacattagcacaacttacgcattggggaattgtgtgtattttctagcacttgtgtattggaaaacctgtatggcagtgatttattcatatattcctgtccaaagccacactgaaaacagaggcagagacatgt

SEQ ID NO: 209 - protein, 185 aa, Homo sapiens
MAGPRPRWRDQLLFMSIIVLVIVVICLMLYALLWEAGNLTDLPNLRIGFYNFCLWNEDTSTLQCHQFPELEALGVPRVGLGLARLGVYGSLVLTLFAPQPLLLAQCNSDERAWRLAVGFLAVSSVLLAGGLGLFLSYVWKWVRLSLPGPGFLALGSAQALLILLLIAMAVFPLRAERAESKLESC

SEQ ID NO: 210 - DNA, 1816 bp, Homo sapiens
gcacgagcgatgtcgctcgtgctgctaagcctggccgcgctgtgcaggagcgccgtaccccgagagccgaccgttcaatgtggctctgaaactgggccatctccagagtggatgctacaacatgatctaatccccggagacttgagggacctccgagtagaacctgttacaactagtgttgcaacaggggactattcaattttgatgaatgtaagctgggtactccgggcagatgccagcatccgcttgttgaaggccaccaagatttgtgtgacgggcaaaagcaacttccagtcctacagctgtgtgaggtgcaattacacagaggccttccagactcagaccagaccctctggtggtaaatggacattttcctacatcggcttccctgtagagctgaacacagtctatttcattggggcccataatattcctaatgcaaatatgaatgaagatggcccttccatgtctgtgaatttcacctcaccaggctgcctagaccacataatgaaatataaaaaaaagtgtgtcaaggccggaagcctgtgggatccgaacatcactgcttgtaagaagaatgaggagacagtagaagtgaacttcacaaccactcccctgggaaacagatacatggctcttatccaacacagcactatcatcgggttttctcaggtgtttgagccacaccagaagaaacaaacgcgagcttcagtggtgattccagtgactggggatagtgaaggtgctacggtgcagctgactccatattttcctacttgtggcagcgactgcatccgacataaaggaacagttgtgctctgcccacaaacaggcgtccctttccctctggataacaacaaaagcaagccgggaggctggctgcctctcctcctgctgtctctgctggtggccacatgggtgctggtggcagggatctatctaatgtggaggcacgaaaggatcaagaagacttccttttctaccaccacactactgccccccattaaggttcttgtggtttacccatctgaaatatgtttccatcacacaatttgttacttcactgaatttcttcaaaaccattgcagaagtgaggtcatccttgaaaagtggcagaaaaagaaaatagcagagatgggtccagtgcagtggcttgccactcaaaagaaggcagcagacaaagtcgtcttccttctttccaatgacgtcaacagtgtgtgcgatggtacctgtggcaagagcgagggcagtcccagtgagaactctcaagactcttccccttgcctttaaccttttctgcagtgatctaagaagccagattcatctgcacaaatacgtggtggtctactttagagagattgatacaaaagacgattacaatgctctcagtgtctgccccaagtaccacctcatgaaggatgccactgctttctgtgcagaacttctccatgtcaagtagcaggtgtcagcaggaaaaagatcacaagcctgccacgatggctgctgctccttgtagcccacccatgagaagcaagagaccttaaaggcttcctatcccaccaattacagggaaaaaacgtgtgatgatcctgaagcttactatgcagcctacaaacagccttagtaattaaaacattttataccaataaaattttcaaatattgctaactaatgtagcattaactaacgattggaaactacatttacaacttcaaagctgttttatacatagaaatcaattacagttttaattgaaaactataaccattttgataatgcaacaataaagcatcttcagccaaaaaaaaaaaaaaaa

SEQ ID NO: 211 - protein, 426 aa, Homo sapiens
MSLVLLSLAALCRSAVPREPTVQCGSETGPSPEWMLQHDLIPGDLRDLRVEPVTTSVATGDYSILMNVSWVLRADASIRLLKATKICVTGKSNFQSYSCVRCNYTEAFQTQTRPSGGKWTFSYIGFPVELNTVYFIGAHNIPNANMNEDGPSMSVNFTSPGCLDHIMKYKKKCVKAGSLWDPNITACKKNEETVEVNFTTTPLGNRYMALIQHSTIIGFSQVFEPHQKKQTRASVVIPVTGDSEGATVQLTPYFPTCGSDCIRHKGTVVLCPQTGVPFPLDNNKSKPGGWLPLLLLSLLVATWVLVAGIYLMWRHERIKKTSFSTTTLLPPIKVLVVYPSEICFHHTICYFTEFLQNHCRSEVILEKWQKKKIAEMGPVQWLATQKKAADKVVFLLSNDVNSVCDGTCGKSEGSPSENSQDSSPCL

SEQ ID NO: 212 - DNA, 1544 bp, Homo sapiens
  Unsure 1358: Unknown base
gcacgagttgggaggtgtagcgcggctctgaacgcgctgagggccgttgagtgtcgcaggcggcgagggcgcgagtgaggagcagacccaggcatcgcgcgccgagaaggccgggcgtccccacactgaaggtccggaaaggcgacttccgggggctttggcacctggcggaccctcccggagcgtcggcacctgaacgcgaggcgctccattgcgcgtgcgcgttgaggggcttcccgcacctgatcgcgagaccccaacggctggtggcgtcgcctgcgcgtctcggctgagctggccatggcgcagctgtgcgggctgaggcggagccgggcgtttctcgccctgctgggatcgctgctcctctctggggtcctggcggccgaccgagaacgcagcatccacgacttctgcctggtgtcgaaggtggtgggcagatgccgggcctccatgcctaggtggtggtacaatgtcactgacggatcctgccagctgtttgtgtatgggggctgtgacggaaacagcaataattacctgaccaaggaggagtgcctcaagaaatgtgccactgtcacagagaatgccacgggtgacctggccaccagcaggaatgcagcggattcctctgtcccaagtgctcccagaaggcaggattctgaagaccactccagcgatatgttcaactatgaagaatactgcaccgccaacgcagtcactgggccttgccgtgcatccttcccacgctggtactttgacgtggagaggaactcctgcaataacttcatctatggaggctgccggggcaataagaacagctaccgctctgaggaggcctgcatgctccgctgcttccgccagcaggagaatcctcccctgccccttggctcaaaggtggtggttctggcggggctgttcgtgatggtgttgatcctcttcctgggagcctccatggtctacctgatccgggtggcacggaggaaccaggagcgtgccctgcgcaccgtctggagctccggagatgacaaggagcagctggtgaagaacacatatgtcctgtgaccgccctgtcgccaagaggactggggaagggaggggagactatgtgtgagctttttttaaatagagggattgactcggatttgagtgatcattagggctgaggtctgtttctctgggaggtaggacggctgcttcctggtctggcagggatgggtttgctttggaaatcctctaggaggctcctcctcgcatggcctgcagtctggcagcagccccgagttgtttcctcgctgatcgatttctttcctccaggtagagttttctttgcttatgttgaattccattgcctccttttctcnatcacagaagtgatgttggaatcgtttcttttgtttgtctgatttatggtttttttaagtataaacaaaagttttttattagcattctgaaagaaggaaagtaaaatgtacaagtttaataaaaaggggccttcccctttagaataaatttccagcatgttgctttcaaaaaaaaaaaaaaaaaaa

SEQ ID NO: 213 - protein, 252 aa, Homo sapiens
MAQLCGLRRSRAFLALLGSLLLSGVLAADRERSIHDFCLVSKVVGRCRASMPRWWYNVTDGSCQLFVYGGCDGNSNNYLTKEECLKKCATVTENATGDLATSRNAADSSVPSAPRRQDSEDHSSDMFNYEEYCTANAVTGPCRASFPRWYFDVERNSCNNFIYGGCRGNKNSYRSEEACMLRCFRQQENPPLPLGSKVVVLAGLFVMVLILFLGASMVYLIRVARRNQERALRTVWSSGDDKEQLVKNTYVL

SEQ ID NO: 214 - DNA, 2077 bp, Homo sapiens
ccgagcgccagcgcggggaaccgggaaaaggaaaccgtgttgtgtacgtaagattcaggaaacgaaaccaggagccgcgggtgttggcgcaaaggttactcccagacccttttccggctgacttctgagaaggttgcgcacagctgtgcccggcagtctagaggcgcagaagaggaagccatcgcctggccccggctctctggaccttgtctcgctcgggagcggaaacagcggcagccagagaactgttttaatcatggacaaacaaaactcacagatgaatgcttctcacccggaaacaaacttgccagttgggtatcctcctcagtatccaccgacagcattccaaggacctccaggatatagtggctaccctgggccccaggtcagctacccacccccaccagccggccattcaggtcctggcccagctggctttcctgtcccaaatcagccagtgtataatcagccagtatataatcagccagttggagctgcaggggtaccatggatgccagcgccacagcctccattaaactgtccacctggattagaatatttaagtcagatagatcagatactgattcatcagcaaattgaacttctggaagttttaacaggttttgaaactaataacaaatatgaaattaagaacagctttggacagagggtttactttgcagcggaagatactgattgctgtacccgaaattgctgtgggccatctagaccttttaccttgaggattattgataatatgggtcaagaagtcataactctggagagaccactaagatgtagcagctgttgttgtccctgctgccttcaggagatagaaatccaagctcctcctggtgtaccaataggttatgttattcagacttggcacccatgtctaccaaagtttacaattcaaaatgagaaaagagaggatgtactaaaaataagtggtccatgtgttgtgtgcagctgttgtggagatgttgattttgagattaaatctcttgatgaacagtgtgtggttggcaaaatttccaagcactggactggaattttgagagaggcatttacagacgctgataactttggaatccagttccctttagaccttgatgttaaaatgaaagctgtaatgattggtgcctgtttcctcattgacttcatgttttttgaaagcactggcagccaggaacaaaaatcaggagtgtggtagtggattagtgaaagtctcctcaggaaatctgaagtctgtatattgattgagactatctaaactcatacctgtatgaattaagctgtaaggcctgtagctctggttgtatacttttgcttttcaaattatagtttatcttctgtataactgatttataaaggtttttgtacattttttaatactcattgtcaatttgagaaaaaggacatatgagtttttgcatttattaatgaaacttcctttgaaaaactgctttgaattatgatctctgattcattgtccattttactaccaaatattaactaaggccttattaatttttatataaattatatcttgtcctattaaatctagttacaatttatttcatgcataagagctaatgttattttgcaaatgccatatattcaaaaaagctcaaagataattttctttactattatgttcaaataatattcaatatgcatattatctttaaaaagttaaatgtttttttaatcttcaagaaatcatgctacacttaacttctcctagaagctaatctataccataatattttcatattcacaagatattaaattaccaattttcaaattattgttagtaaagaacaaaatgattctctcccaaagaaagacacattttaaatactccttcactctaaaactctggtattataacttttgaaagttaatatttctacatgaaatgtttagctcttacactctatccttcctagaaaatggtaattgagattactcagatattaattaaatacaatatcatatatatattcacagagtataaacctaaataatgatctattagattcaaatatttgaaataaaaacttgatttttttgt

SEQ ID NO: 215 - protein, 318 aa, Homo sapiens
MDKQNSQMNASHPETNLPVGYPPQYPPTAFQGPPGYSGYPGPQVSYPPPPAGHSGPGPAGFPVPNQPVYNQPVYNQPVGAAGVPWMPAPQPPLNCPPGLEYLSQIDQILIHQQIELLEVLTGFETNNKYEIKNSFGQRVYFAAEDTDCCTRNCCGPSRPFTLRIIDNMGQEVITLERPLRCSSCCCPCCLQEIEIQAPPGVPIGYVIQTWHPCLPKFTIQNEKREDVLKISGPCVVCSCCGDVDFEIKSLDEQCVVGKISKHWTGILREAFTDADNFGIQFPLDLDVKMKAVMIGACFLIDFMFFESTGSQEQKSGVW

SEQ ID NO: 216 - DNA, 5113 bp, Homo sapiens
agagcttcagtctgagtcccagcgccgagagcgtgtctgaccggttggacccctacagcagcggcggcggctcctcgtcgtcgtcggaagagctcgaggccgacgcagcctcggccccgacgggggtcccgggccagccccgccgtcccggccaccccgcgcagcccctcccgcttccccagacggcttcctcgcctcagccgcagcagaaagccccgagggccattgacagcccgggcggggccgtccgcgaggggtcgtgcgaggagaaggcagcggcagccgtggccccgggaggcctccagtctacccccgggaggagcggggtgaccgcggagaaggcgcctccgccgcccccgccgcccaccctgtacgtgcagctccacggagagaccacccggcgcttggaggcggaggagaagccattgcagatccaaaatgactacctcttccaactgggatttggggagctgtggagggtgcaggaggaaggcatggactcggagattggctgcctcatccgcttctatgcaggaaaacctcacagcacgggtagctctgaacggattcagctctcaggaatgtataatgtccgtaaaggcaagatgcagttgccagtgaaccgatggacaagacgccaagtcatcctatgtgggacctgcctgatagtatcatctgtgaaagacagcttgaccggaaagatgcatgttctgccactaattggtggaaaagtagaagaagtgaaaaagcaccaacactgtttagcatttagctcctctggaccccaaagccagacttactacatttgctttgatactttcacagaatacttaaggtggctgcgacaagtctccaaggttgcatcccagcgcattagctcagtggacctctcgtgttgtagcctggaacatctgcctgccaacctcttctacagccaagacctcactcatctcaatttaaaacaaaacttcctaaggcagaaccctagccttccagctgccagggggcttaatgaactgcaaaggttcaccaagttgaagagtcttaacctttccaataatcatttaggggacttccctctggcagtctgcagtattccaaccctggcagagctgaacgtgtcctgcaatgccctgcgatcagtcccggcagccgttggagtgatgcacaacttacagacatttttgttggatggaaactttctccaatcccttcctgctgagttggagaacatgaagcagcttagttatctgggtctttctttcaatgaatttactgacattcccgaagtattggagaaattgactgctgtggataaactttgtatgtctggaaactgtgtggagacccttaggctacaggctttaagaaaaatgcctcacattaaacatgtggatctaaggttgaacgtaattaggaagctgatagcagatgaagtggactttctacagcatgttactcagcttgacctacgagacaataagcttggtgatctagatgctatgattttcaacaacattgaagttttacactgtgaaaggaatcaactggtcacattagacatctgtggctatttcctaaaagcgctctatgcctcttctaatgaacttgttcaacttgatgtttacccagttccaaattatctgtcctacatggatgtttcaaggaaccgcttagaaaatgtgcctgagtgggtatgtgaaagccgaaagctagaagttttggatattggccataatcaaatatgtgaacttcctgcccgcttattttgtaatagcagtctccggaaactactggcaggacacaaccagttggcaaggctgcctgaaaggctagaaagaacctcggtggaggtcttggatgtgcaacacaaccagctccttgagctcccacctaaccttctgatgaaggctgacagcctgagattcctgaacgcctctgcgaacaaactggaaagccttcctccagccacgctttccgaagagacaaacagtatcttacaagagttgtatttgacaaataacagcctcacagacaaatgtgtgcccttgttaacgggacacccccatttgaagatccttcacatggcctataaccgacttcagagttttccagcaagtaaaatggcgaaactggaggaacttgaagaaattgatctcagtgggaataagctgaaagccatcccaacaacgatcatgaattgcagccgcatgcacaccgtgattgctcactccaactgcatcgaggtctttcccgaagttatgcagctcccagagatcaagtgtgtggacctgagctgtaatgagctaagtgaagtcacattaccagaaaacctgcctcccaaactgcaggagctagacctgactggaaacccgcgccttgtccttgatcacaaaaccctggaactactgaataatatccgctgtttcaagattgatcagccttctacaggagacgcttccggagccccagctgtatggagtcatggttacactgaagcttcgggggtaaaaaacaagttgtgtgtcgcagccctgtcggtgaataacttctgtgacaaccgcgaagccctgtatggtgtgtttgacggagaccggaatgtggaggtgccctaccttctccagtgcactatgagtgacattttggctgaagagctgcaaaaaacaaaaaacgaagaagaatacatggtcaatacattcattgtcatgcaaaggaaacttggaactgctgggcagaagcttggtggtgccgctgtcctttgtcatatcaagcatgaccctgtggatccaggaggatccttcaccttgacctctgctaatgtgggcaagtgccaaacagttctctgtcgaaatggaaagccgctgcctctgtccagatcttacatcatgagctgtgaagaagagctgaagaggattaaacagcacaaggccattatcactgaggatggcaaggtgaacggagtgactgagtccacgcgcatcctgggctacaccttcctccatcccagtgtggtgcctcgcccccacgtgcagtccgtgctcctgactccccaggatgagttcttcatcctaggcagtaaggggttgtgggacagcctgtccgtcgaggaggccgtggaagccgtgcgcaacgtgcccgatgccctggctgctgccaagaagctgtgtaccctggcccagagctacggctgccacgacagcatcagcgctgtggtggtgcagctcagtgtcactgaggacagcttctgctgctgcgagctcagcgccggtggggctgtgccaccacccagtcctggcatctttcctccctcagtgaacatggtgatcaaggatcggccctcagatgggctgggcgtgccgtcctccagcagcggcatggcttccgagattagcagtgagctctccacttctgagatgagcagcgaggtggggtcaacagcctccgatgagcccccgcccggagccctaagcgagaacagccctgcctaccccagtgagcagcgctgcatgctccaccccatctgtctgtccaactccttccagcgccagctatccagcgccacgttctctagcgccttctccgacaacggccttgacagtgacgatgaggagcccatcgagggcgtcttcaccaacggcagccgggtggaggtggaggtggacatccactgcagccgggccaaggagaaggagaaacagcagcacctgcttcaggtgccagcagaggccagtgatgagggcattgtcatcagcgccaacgaggatgagccaggtctgcccaggaaggcagacttctctgccgttgggaccattgggcgccggagggccaatggctctgttgcgccccaggaaaggagccacaatgtgatagaggtggctacagacgcacctcttcgaaagcctggaggctattttgctgccccggctcagccggatcctgatgatcagtttatcatacccccggagctggaagaggaggtcaaagaaatcatgaagcatcaccaggagcaacagcagcagcagcagccgccaccaccccctcagctccagccgcagctgccgcggcactaccagctggaccagctgccagattattacgacacgccactatgacccagccgagctgtttaacaaataaactaaccacaaaagactgagttgcaagagtctcccaggctcacattaaaccaggggttttactccacatccttcccccagacactgttcccaacctgtcatcgcagctaatctgtaggttctctttctttgggttatttttttaagtaatcaccactttcttctagtgatgctttaccaatatgatttacatttgttaacttctccccctaacatatcagatatgtaaagacaaagaacaaaaggtttaatatattacagagaaacagttaatgataatgtaatattttttaaaatggctttttgttgtttgtttggaaggcagggcaggctgccgttgctaaatgatttaataatattgtaattctgtatttctttggggggaaaaggcttttgttttgttttgttttgttttgttttgtttttgtcttgaaaataatagacatttgtagaatatggagactaactcctaggagttgctttactctgtcaggtgacttaagtcactgggattcactaattttctctgagagaacagctgattgagaatttccattgtaaatagctcagtgttgtatagtgaggcttacgatgttttgtagtcttggcgtaaggacacagcccaagtaactgacgtttcccctccccctcccctctgaggagcctgcctgcctcacaactcaccctcacttcactgaatgaggaggctgagcagctgcagtgtttctgtccggaggaaatggatcttaggccactggacaagaacctgcacccaagggccctgaacccattttcctcccctgtcccagccttcccactttgacagacacttttaactgtgttccttactgctgccacaatcagcatggttgtatagtgccccattaggccatttacatacccagagttatactcaagcagaatgcacaaatggacatgtcataatttttgttacaataaatatgaaatttacaagt

SEQ ID NO: 217 - protein, 858 aa, Homo sapiens
ERNQLVTLDICGYFLKALYASSNELVQLDVYPVPNYLSYMDVSRNRLENVPEWVCESRKLEVLDIGHNQICELPARLFCNSSLRKLLAGHNQLARLPERLERTSVEVLDVQHNQLLELPPNLLMKADSLRFLNASANKLESLPPATLSEETNSILQELYLTNNSLTDKCVPLLTGHPHLKILHMAYNRLQSFPASKMAKLEELEEIDLSGNKLKAIPTTIMNCRRMHTVIAHSNCIEVFPEVMQLPEIKCVDLSCNELSEVTLPENLPPKLQELDLTGNPRLVLDHKTLELLNNIRCFKIDQPSTGDASGAPAVWSHGYTEASGVKNKLCVAALSVNNFCDNREALYGVFDGDRNVEVPYLLQCTMSDILAEELQKTKNEEEYMVNTFIVMQRKLGTAGQKLGGAAVLCHIKHDPVDPGGSFTLTSANVGKCQTVLCRNGKPLPLSRSYIMSCEEELKRIKQHKAIITEDGKVNGVTESTRILGYTFLHPSVVPRPHVQSVLLTPQDEFFILGSKGLWDSLSVEEAVEAVRNVPDALAAAKKLCTLAQSYGCHDSISAVVVQLSVTEDSFCCCELSAGGAVPPPSPGIFPPSVNMVIKDRPSDGLGVPSSSSGMASEISSELSTSEMSSEVGSTASDEPPPGALSENSPAYPSEQRCMLHPICLSNSFQRQLSSATFSSAFSDNGLDSDDEEPIEGVFTNGSRVEVEVDIHCSRAKEKEKQQHLLQVPAEASDEGIVISANEDEPGLPRKADFSAVGTIGRRRANGSVAPQERSHNVIEVATDAPLRKPGGYFAAPAQPDPDDQFIIPPELEEEVKEIMKHHQEQQQQQQPPPPPQLQPQLPRHYQLDQLPDYYDTPL

SEQ ID NO: 218 - DNA, 3493 bp, Homo sapiens
agcggccggggccacgatggagcgcgacggctgcgcggggggcgggagccgcggcggcgagggcgggcgcgctccccgggagggcccggcggggaacggccgcgatcggggccgcagccacgctgccgaggcgcccggggacccgcaggcggccgcgtccttgctggcccctatggacgtgggggaggagccgctggagaaggcggcgcgcgcccgcactgccaaggaccccaacacctataaagtactctcgctggtattgtcagtatgtgtgttaacaacaatacttggttgtatatttgggttgaaaccaagctgtgccaaagaagttaaaagttgcaaaggtcgctgtttcgagagaacatttgggaactgtcgctgtgatgctgcctgtgttgagcttggaaactgctgtttagattaccaggagacgtgcatagaaccagaacatatatggacttgcaacaaattcaggtgtggtgagaaaaggttgaccagaagcctctgtgcctgttcagatgactgcaaggacaagggcgactgctgcatcaactacagttctgtgtgtcaaggtgagaaaagttgggtagaagaaccatgtgagagcattaatgagccacagtgcccagcagggtttgaaacgcctcctaccctcttattttctttggatggattcagggcagaatatttacacacttggggtggacttcttcctgttattagcaaactaaaaaaatgtggaacatatactaaaaacatgagaccggtatatccaacaaaaactttccccaatcactacagcattgtcaccggattgtatccagaatctcatggcataatcgacaataaaatgtatgatcccaaaatgaatgcttccttttcacttaaaagtaaagagaaatttaatcctgagtggtacaaaggagaaccaatttgggtcacagctaagtatcaaggcctcaagtctggcacatttttctggccaggatcagatgtggaaattaacggaattttcccagacatctataaaatgtataatggttcagtaccatttgaagaaaggattttagctgttcttcagtggctacagcttcctaaagatgaaagaccacacttttacactctgtatttagaagaaccagattcttcaggtcattcatatggaccagtcagcagtgaagtcatcaaagccttgcagagggttgatggtatggttggtatgctgatggatggtctgaaagagctgaacttgcacagatgcctgaacctcatccttatttcagatcatggcatggaacaaggcagttgtaagaaatacatatatctgaataaatatttgggggatgttaaaaatattaaagttatctatggacctgcagctcgattgagaccctctgatgtcccagataaatactattcatttaactatgaaggcattgcccgaaatctttcttgccgggaaccaaaccagcacttcaaaccttacctgaaacatttcttacctaagcgtttgcactttgctaagagtgatagaattgagcccttgacattctatttggaccctcagtggcaacttgcattgaatccctcagaaaggaaatattgtggaagtggatttcatggctctgacaatgtattttcaaatatgcaagccctctttgttggctatggacctggattcaagcatggcattgaggctgacacctttgaaaacattgaagtctataacttaatgtgtgatttactgaatttgacaccggctcctaataacggaactcatggaagtcttaaccaccttctaaagaatcctgtttatacgccaaagcatcccaaagaagtgcaccccctggtacagtgccccttcacaagaaaccccagagataaccttggctgctcatgtaacccttcgattttgccgattgaggattttcaaacacagttcaatctgactgtggcagaagagaagattattaagcatgaaactttaccctatggaagacctagagttctccagaaggaaaacaccatctgtcttctttcccagcaccagtttatgagtggatacagccaagacatcttaatgcccctttggacatcctataccgtggacagaaatgacagtttctctacggaagacttctccaactgtctgtaccaggactttagaattcctcttagtcctgtccataaatgttcattttataaaaataacaccaaagtgagttacgggttcctctccccaccacaactaaataaaaattcaagtggaatatattctgaagctttgcttactacaaatatagtgccaatgtaccagagttttcaagttatatggcgctactttcatgacaccctactgcgaaagtatgctgaagaaagaaatggtgtcaatgtcgtcagtggtcctgtgtttgactttgattatgatggacgttgtgattccttagagaatctgaggcaaaaaagaagagtcatccgtaaccaagaaattttgattccaactcacttctttattgtgctaacaagctgtaaagatacatctcagacgcctttgcactgtgaaaacctagacaccttagctttcattttgcctcacaggactgataacagcgagagctgtgtgcatgggaagcatgactcctcatgggttgaagaattgttaatgttacacagagcacggatcacagatgttgagcacatcactggactcagcttctatcaacaaagaaaagagccagtttcagacattttaaagttgaaaacacatttgccaacctttagccaagaagactgatatgttttttatccccaaacaccatgaatctttttgagagaaccttatattttatatagtcctctagctacactattgcattgttcagaaactgtcgaccagagttagaacggagccctcggtgatgcggacatctcagggaaacttgcgtactcagcacagcagtggagagtgttcctgttgaatcttgcacatatttgaatgtgtaagcattgtatacattgatcaagttcgggggaataaagacagaccacacctaaaactgcctttctgcttctcttaaaggagaagtagctgtgaacattgtctggataccagatatttgaatctttcttactattggtaataaaccttgatggcattgggcaaacagtagacttatagtagggttggggtagcccatgttatgtgactatctttatgagaattttaaagtggttctggatatcttttaacttggagtttcatttcttttcattgtaatcaaaaaaaaaattaacagaagccaaaatacttctgagaccttgtttcaatctttgctgtatatcccctcaaaatccaagttattaatcttatgtgttttctttttaattttttgattggatttctttagatttaatggttcaaatgagttcaactttgagggacgatctttgaatatacttacctattataaaatcttactttgtatttgtattt

SEQ ID NO: 219 - protein, 873 aa, Homo sapiens
MDVGEEPLEKAARARTAKDPNTYKVLSLVLSVCVLTTILGCIFGLKPSCAKEVKSCKGRCFERTFGNCRCDAACVELGNCCLDYQETCIEPEHIWTCNKFRCGEKRLTRSLCACSDDCKDKGDCCINYSSVCQGEKSWVEEPCESINEPQCPAGFETPPTLLFSLDGFRAEYLHTWGGLLPVISKLKKCGTYTKNMRPVYPTKTFPNHYSIVTGLYPESHGIIDNKMYDPKMNASFSLKSKEKFNPEWYKGEPIWVTAKYQGLKSGTFFWPGSDVEINGIFPDIYKMYNGSVPFEERILAVLQWLQLPKDERPHFYTLYLEEPDSSGHSYGPVSSEVIKALQRVDGMVGMLMDGLKELNLHRCLNLILISDHGMEQGSCKKYIYLNKYLGDVKNIKVIYGPAARLRPSDVPDKYYSFNYEGIARNLSCREPNQHFKPYLKHFLPKRLHFAKSDRIEPLTFYLDPQWQLALNPSERKYCGSGFHGSDNVFSNMQALFVGYGPGFKHGIEADTFENIEVYNLMCDLLNLTPAPNNGTHGSLNHLLKNPVYTPKHPKEVHPLVQCPFTRNPRDNLGCSCNPSILPIEDFQTQFNLTVAEEKIIKHETLPYGRPRVLQKENTICLLSQHQFMSGYSQDILMPLWTSYTVDRNDSFSTEDFSNCLYQDFRIPLSPVHKCSFYKNNTKVSYGFLSPPQLNKNSSGIYSEALLTTNIVPMYQSFQVIWRYFHDTLLRKYAEERNGVNVVSGPVFDFDYDGRCDSLENLRQKRRVIRNQEILIPTHFFIVLTSCKDTSQTPLHCENLDTLAFILPHRTDNSESCVHGKHDSSWVEELLMLHRARITDVEHITGLSFYQQRKEPVSDILKLKTHLPTFSQED

SEQ ID NO: 220 - DNA, 4248 bp, Homo sapiens
cccgggctgtgggctacaggcgcagagcgggccaggcgcggagctggcggcagtgacaggaggcgcgaacccgcagcgcttaccgcgcggcgccgcaccatggagcccgccgtgtcgctggccgtgtgcgcgctgctcttcctgctgtgggtgcgcctgaaggggctggagttcgtgctcatccaccagcgctgggtgttcgtgtgcctcttcctcctgccgctctcgcttatcttcgatatctactactacgtgcgcgcctgggtggtgttcaagctcagcagcgctccgcgcctgcacgagcagcgcgtgcgggacatccagaagcaggtgcgggaatggaaggagcagggtagcaagaccttcatgtgcacggggcgccctggctggctcactgtctcactacgtgtcgggaagtacaagaagacacacaaaaacatcatgatcaacctgatggacattctggaagtggacaccaagaaacagattgtccgtgtggagcccttggtgaccatgggccaggtgactgccctgctgacctccattggctggactctccccgtgttgcctgagcttgatgacctcacagtggggggcttgatcatgggcacaggcatcgagtcatcatcccacaagtacggcctgttccaacacatctgcactgcttacgagctggtcctggctgatggcagctttgtgcgatgcactccgtccgaaaactcagacctgttctatgccgtaccctggtcctgtgggacgctgggtttcctggtggccgctgagatccgcatcatccctgccaagaagtacgtcaagctgcgtttcgagccagtgcggggcctggaggctatctgtgccaagttcacccacgagtcccagcggcaggagaaccacttcgtggaagggctgctctactccctggatgaggctgtcattatgacaggggtcatgacagatgaggcagagcccagcaagctgaatagcattggcaattactacaagccgtggttctttaagcatgtggagaactatctgaagacaaaccgagagggcctggagtacattcccttgagacactactaccaccgccacacgcgcagcatcttctgggagctccaggacatcatcccctttggcaacaaccccatcttccgctacctctttggctggatggtgcctcccaagatctccctcctgaagctgacccagggtgagaccctgcgcaagctgtacgagcagcaccacgtggtgcaggacatgctggtgcccatgaagtgcctgcagcaggccctgcacaccttccaaaacgacatccacgtctaccccatctggctgtgtccgttcatcctgcccagccagccaggcctagtgcaccccaaaggaaatgaggcagagctctacatcgacattggagcatatggggagccgcgtgtgaaacactttgaagccaggtcctgcatgaggcagctggagaagtttgtccgcagcgtgcatggcttccagatgctgtatgccgactgctacatgaaccgggaggagttctgggagatgtttgatggctccttgtaccacaagctgcgagagaagctgggttgccaggacgccttccccgaggtgtacgacaagatctgcaaggccgccaggcactgagctggagcccgcctggagagacagacacgtgtgagtggtcaggcatcttcccttcactcaagcttggctgctttcctagatccacactttcaaagagaaacccctccagaactcccaccctgacagcccaacaccaccttcctcctggcttccagggggcagcccagtggaatggaaagaatgtgggatttggagtcagacaagcctgagtccagttccccgtttagaactcattagctgtgtgactctgggtgagtcccttaacccctctgagcccgggtctcttcattagttgaaagggatagtaatacctacttgcaggttgttgtcatctgagttgagcactggtcacattgaaggtgctgggtaagtggtagctcttgttgcttcccgttcagcgtcacatctgcagtggagcctgaaaaggctccacattaggtcacctgtgcacagccatggctggaatgatgaaggggatacgctggagttgccctgccatcgcctccatcagccagacgaggtcctcacaggagaaggacagctcttccccaccctgggatctcaggagggcagccacggagtggggaggccccagatgcgctgtgccaaagccaggtccgaggccaaagttctccctgccatccttggtgccgtcctgccccttcctccttcatgcctgggcctgcaggcccaccccagccaccactgagtccactcggagtgccctgtgttcctggagaaggcattccagggttgaatcttgtcccagcctcagcctgggacacctaggtggagagagtggtctccgctctgaattggatccaggggacctgggctcattcttcttggctcaccaaccctgcaggcctcatctttcccaaaacccactttgtcttggtgggagtgggtccgcgctgctctgcagcaggggctggggagtggacagcatcaggtgggaaagtggagtccaccctcatgtttctgtaggattctcaccgtggggctggaagaaaagagcatcgacttgatttctccaaccactcatccctctttttctttcttccaccactccccaccccagctgtagttaatttcagtgccttacaaatcctaagctcagagaaagttccatttccgttccagagggaagggaacctccctaggtccttccctggcttgttataacgcaaagcttggttgtttatgcaactctatcttaagaactgcccagcctcagctgaaaacccgaatctgagaaggaattgcgtcatgtaagggaagctggaattaagggagctgagccagtcatggttgtggcgtgtgagtcaggagacctaggtttcagcccctctctactgtcagcgagctgtgcaacgtgggcaagtcattgtcctctgagctgcagtttcctcatctgtcacatcgctacagacaagacctccctggaacccttctgattgtcttagacactgtggttgcaaaacccacggaaagcctcatttgtgtggaaagtcagaggaaaaatgatccagtggacacttggggattatctgtcattcaagatccttccttcaaccccaaggccagctcccatctcatttccagaaaggctcatacctggcttgcagggaagcatctgtcttgtcattccaggtgccagaatcctctcagagtcattgaagggtgttcacccatcccacccaaggcttggcacactgccagtgtcttagcagggtcttgtgagggctgggggcatccaggcactcagaaggcaaaggaaccaccctacccatttggcctctggagggggcagaagaaagaaagaaacctcatcctatattttacaaagcatgtgaattctggcattagctctcataggagacccatgtgcttccttgctcagtgcaaaactgatgattctacttgctgtagatgaatggttaacacgagctagttaaacagtgccattgttttgccagtgaagcctccaaccctaagccactgggacggtggccagagatgccagcagcctctgtcgcccttagtcatataaccaaaatccagaccttatccacaacccggggcttggaaaggaaggtattttggaatcacaccctccggttatgttgctccagtaaaatcttgcctggaaagaggcagtcttcttagcatggtgagctgagttcatggcttttttttgtagccagtcctgtccctggccatccatgtgatggttttggatggagttaaacttgatgccagtgggcagtgcatgtggaaagtatcagagtaagcctctcccctccagagccctgagtttcttggctgcatgaaggttttctttagaatcagaattgtagccagtttctttggccagaaggatgaatacttggatattactgaaagggaggggtggagatgggtgtggcagtgtatggtgtgtgatttttattttcttctttggtcatgggggccaaggagaaaggcatgaatcttccctgtcaggctcttacagccacaggcactgtgtctactgtctggaagacatgtccccgtggctgtggggccgctgcttctgtttaaataaaagtggcctgg

SEQ ID NO: 221 - protein, 516 aa, Homo sapiens
MEPAVSLAVCALLFLLWVRLKGLEFVLIHQRWVFVCLFLLPLSLIFDIYYYVRAWVVFKLSSAPRLHEQRVRDIQKQVREWKEQGSKTFMCTGRPGWLTVSLRVGKYKKTHKNIMINLMDILEVDTKKQIVRVEPLVTMGQVTALLTSIGWTLPVLPELDDLTVGGLIMGTGIESSSHKYGLFQHICTAYELVLADGSFVRCTPSENSDLFYAVPWSCGTLGFLVAAEIRIIPAKKYVKLRFEPVRGLEAICAKFTHESQRQENHFVEGLLYSLDEAVIMTGVMTDEAEPSKLNSIGNYYKPWFFKHVENYLKTNREGLEYIPLRHYYHRHTRSIFWELQDIIPFGNNPIFRYLFGWMVPPKISLLKLTQGETLRKLYEQHHVVQDMLVPMKCLQQALHTFQNDIHVYPIWLCPFILPSQPGLVHPKGNEAELYIDIGAYGEPRVKHFEARSCMRQLEKFVRSVHGFQMLYADCYMNREEFWEMFDGSLYHKLREKLGCQDAFPEVYDKICKAARH

SEQ ID NO: 222 - DNA, 2002 bp, Homo sapiens
ctcttctcacatcagcgggtccaggcccaaccgacagactatgggggctccttcaccaggcgctgcgtggagtggctgctgggcctctacttcctcagccacatccccatcaccctgttcatggacctgcaggcggtcgtgccgcgcgagctctacccagtcgagtttagaaacctgctgaagtggtatgctaaggagttcaaagacccactgctacaggagcccccagcctggtttaagtcctttctgttttgcgagcttgtgtttcagctgcctttctttcccattgcaacgtatgccttcctcaaaggaagctgcaagtggattcgaactcctgcaatcatctactctgttcacaccatgacaaccttaattctgatactctccacatttctgtttgaggatttctccaaagccagtggtttcaagggacaaagacctgagactttgcatgaacggttaacccttgtgtctgtctatgccccctacttactcatcccattcatacttttaattttcatgttgcggagcccctactacaagtatgaagagaaaagaaaaaaaaaatgaaggaaacaaccactggcccagggtagagatgcctacagggtggttgcttgttggatacatacaggaacactgctcagaacccacgtcttcagcagcatttgaaacactggcagcaatgcacaagagcaagatggtgtcaggaaccatgtcaaaccctcaccttcttccattttttttttttttttgagacagtctcactctgttgccaggctggagtaaagggcagtggcatgatctcggctcactgcaacctccgcctcctgggctcaagccatcttccttagcctcccaagtagctagaactacaggtgtgtaccaacacgtatggctaatttgttttgttttttttgtgtgtgtggagacagggttttgccatgttgcccaggttggtctcgaacgcctaggctcaagtgatctgcccacctcagtctccctaagtgctgggattacagacgtgaaccactgggcccagcccaaaccttcaccttctaagggcactgggatgaacagaccgatcggcttgagggtgggcaaaggggtgtgggctaggttataaggaagtggtaccaaataactgtgttgcctgagttccaccgcaagattactaaaagcaggaccagaccagaaactgctaaagaacatggcctgtttgacatgttcatgagtcacctgacccacagcatatatgcttatgactaaaccctccactcctgattctcaagagtgtatcacctgtcagcaaaatgaatagtgggatattttgggccattttaaatgtgaaattttgcctctttaatgttaattcaaaactatatcaatgttttcttgttcccacctctaacccaaggaaaaaagagaaaacatactatgcaaaggaagtttaaacttaagttttccttaagggtcagcccaacaatgactttcagtcaaatggattaaactggaaaatgtttttgtttctgttgtaaacagatcatcctaggcgaaagttttttttgtttgtttgcttttaaattagtttatttctaaatcttagtcttccacatttctagaggccacctgacacaagtccctgtatctgaagtctagcatctcaaggctgatctggaagtgtgctagtatgctccctagtggataacttaatcttttaatacagttccgtcattcccatcttgttttcagaagagaaggtggctacagccaggcataacttatccactgtgtgcatagagggtctcttcacgttgatgcttggcattccatcagctttctctaagtctttgctcaagttcaaggttaaaatgatgttagacaacaggtcccagtcagtcccctctattttcacccattttgctcacaagccatattggcccgattagtggtactgtctgactcacgtgtgtgatccaaataaaggtagctgccgggaatt

SEQ ID NO: 223 - DNA, 279 bp, Homo sapiens
gggtatttcatgttatgcccatttatagtttactgtggattgtttgtatcccttacctgctttctattgggttatgtgtggatatattgtttttatttgttcagcatctccttccccatcttctggtaacacaacctttatttatttgtggggaacctattccctgtggcttaggtgagcatgtgaccaggcctggcctcctgagtcccacagcttcctagccacagtgataaaagaatgggtatataacttaagccaggctaaggaaagcccttaaca

SEQ ID NO: 224 - DNA, 2100 bp, Homo sapiens
  Unsure 149,164: Unknown base
tacttttagatttactgccttcaaaaagtgcctattctgagcaacataaacgttattccttacatatgtatgtacacacggtacccagagtcgtactgtggcagccttcaaaaacataccatcagaaagagtaggtgctgagataaggnaactttgccaaatgnaagaaagtcactcacttccaatatcccctcttcaagcggctaccgtgraasgggctgcaaacacattccctgagcatcccttgctgatacagcttctttatatttatatcctactggatggtagcatattgctaaggtttcctgtactctgcttcaagggaatgtaagytttatggcattgaaacatttaggaaaaaaaaagatgtttaagagaattaatagagccgtagtctgtattaggatgtgtgtcatatgtgtgttctataaactaagcatcggtgggtttagagtgttaaagtgtcagcacattccttctccttttgtctctcaggctaacatgagagaaaatagaaaagtcttggctgtggggattggaagctcagggggccaaatgtccttgccagatccttagagcattactttgactcctaaaaatagtagtgtatgttatttgatggcttttgtttccatagttccatcactgacaaaactgtcaatactgttgatggagcagcagcatagcctagagtgatgcattcttacccagaggtggcaataggagagggtccatgtaaataggacgaggtagacagtgcatgattgtaggagaagggttgaagggaggacatgattccaaaaaagatcgttctcaatgtgtcgtctgactcaaccagctggcagattacacttgccaagtcgttccctttccttctaagtcagttggctccatattcacttgaatatgcctctgtttgggcaaagcaagatacctccacttaacctttatccaaggaagctcttggtgtcctcttggtcataaagttgtctcctacctaacccagttttaccaaatggaagtaaaaggggacaaactatggaagatggactccatgccattgcagtcagccaccattctcttttccatataaggagccccattacataagctacgggtgaggttggaacagctatgtttcataatttcaagagtgtgaccaccctgctctagtcatcatcattggatgaatccagttgactctttggcaaaagggtgatacttttcactaaaaatgcctactcttcctgttgatgttccttttctgtttttaccttgtccaatttccacactagtcattttttttattttttagaggatcagattttagcgctggaaaatgagttcaaaaatttcagtgtaatgtcataaggatgttgggatacagagattttttttttccttggaaacaaatggactgggaagaaacacagcatggctttgctctgagtttcaatctgatgattatgaccatggaagatagtcttatgtaaaggttaaatggtgtttacaagtggatagataaggcggagatggtgagaagccgggttttctctatgctaaatgtgtctactaagagcagcacttcctactagctaagcacaatcatagccccaccgtgatgagctgctagtctgaataacattccctgacttagggaaaggcacacaaaaacatataaagaatatgtctattttcatatgtgtgatactgacagagccatggtattcctaaaatataggtttctcttttttcttgtattcttagcaaattgcatttattcactacattacaaaccatcactgatgtatccaaaatagcacacatagttcagtatgaaaataagagaataaaatctgttataagcaagtgatttaggtattttcttttgtgtttatgcattatctgactatattaaaacctgtttttctatttaccttctatcagttttctctaccaattatgttttttcaatgctctataagaatgaatatggaaattatatttcttttttctgtaaaagagttgcaactactttattatatttagaaatccaataaacttcttattacatttaaaaaaaaaaaaaaaaaactcgaa

SEQ ID NO: 225 - protein, 32 aa, Homo sapiens
MVFLKYRFLFFLVFLANCIYSLHYKPSLMYPK

SEQ ID NO: 226 - DNA, 2078 bp, Homo sapiens
tgggcaattaaccaagccatagccaatgaatatgaagtccggagaaagctgctaataaaacgtttggatgtcactgtacaatcctttggctggtctgacagagctaagagccagacagaaaaattagccaaggtttaccagccgaaacgttcagtcttatcccctaaaactactatttctgttgcccatcttttggctgcaaggcaggacttgtcaaagattttaaggacaagcagcggctctataagagaaaagactgcctgtgccatcaataaggtgttgatgggcagggtgcctgacagaggtggtagacccaatgaaatcgaacctccacccccagagatgccaccgtggcagaagaggcaagatggcccccagcagcaaacaggaggccgagtaggagggagaggtggctatgaacattcctcatacggaggacgaggaggtcatgaacaaggaggcgggagaggtggacgtggtggctatgaccatggtggccgagggggaggaagaggaaataagcatcaaggaggctggacagatggagggagtggtggaggaggtggctaccaagatggtggttatcgagattcaggtttccagccaggtggctatcatggtggccacagcagtggtggctatcaaggcggaggttatggtggcttccaaacatcttcttcatatacaggaagtggataccagggtggtggctaccagcaggacaatagataccaagatggcgggcaccatggtgatcgtggtggtggtcgtggtgggcgaggtggtcgtggaggccgaggtggtcgtgcaggccagggaggaggctggggaggaagagggagccagaattatcaccaagggggtcaatttgaacagcatttccagcatggaggttatcagtataatcattctggatttggacagggaagacattacactagttgaggctaccgaactttacattttgctagagctcaagtaatagaaacttagtttcagaatcctgaattcagcacctattttgaattaatgtgagaccacaggtggcaggcagattcctgcttggcataagcatttgtaggtcttcattcaattctgttagatttttttattggacttacataatgccgtttatttgagaaacacataacatctctccttcctatgaaaaattttttaaaaggtggttaaaattgcctttaattgcccagtagactaattccacagtcagaacatgcaaacttttttgaagaaattacttgaataagtagttttcatgttttcaatatgcagttttgaaaatgaggattcacctagacttttttagatttactactaggaaaccttcctcatatgaataaccatttatatgtgttttgcttaaagtattccaatgcctattttccaagcacagttctgccccccggttgacttttatgccacgtgtgcttcatgatggaacttttaggtcagttcctattaaatgagctcttctgcagatagcacattcagtagccttattttgttgatggaatactgtatcatatgctcaactctgaaaaccttgaacacggccaaaatccataaagattataaaagcaaactaagttgtgaagctatagtacatgtaggcatttagttaagtatagcaattcaaactgacctgcatccatccaaaacaaattcctccttcaaccttatttttacttgaaatttgctagaagaaatagcaaaccgaaatttgttttatgcatgagttaataccactggctcagcaaatacaagttagtttgctttaagcaggtaactttttttgtaatggaagaaatgcactacaaagttaagacagatttttgctaagtgcaggaggccctttattattgctgcagaaaacaaaagcctggctgagttgatgttttacattctcccttactgaaatctacatgacatgatgcttcttgctgggtttttgtacatgtaaacattgtcaagctgtgaaagaaaatggctggaggtgtgctttgtgtgaaaggtgagcaataaagtatctgttaagttcaaaaaaaaaaaaaaaaaaa

SEQ ID NO: 227 - protein, 314 aa, Homo sapiens
WAINQAIANEYEVRRKLLIKRLDVTVQSFGWSDRAKSQTEKLAKVYQPKRSVLSPKTTISVAHLLAARQDLSKILRTSSGSIREKTACAINKVLMGRVPDRGGRPNEIEPPPPEMPPWQKRQDGPQQQTGGRVGGRGGYEHSSYGGRGGHEQGGGRGGRGGYDHGGRGGGRGNKHQGGWTDGGSGGGGGYQDGGYRDSGFQPGGYHGGHSSGGYQGGGYGGFQTSSSYTGSGYQGGGYQQDNRYQDGGHHGDRGGGRGGRGGRGGRGGRAGQGGGWGGRGSQNYHQGGQFEQHFQHGGYQYNHSGFGQGRHYTS

SEQ ID NO: 228 - DNA, 921 bp, Homo sapiens
ggaactgctgctcatggaactggctcctctcctcttgccacttgagtctgttcgagaagtccagggaagaacttgaagagcaaaatacactcttgagtttgttgggttttgggagaggtgacagtagagaagggggttgtgtttaaaataaacacagtggcttgagcaggggcagaggttgtgatgctatttctgttgactcctagcagccatcaccagcatgaatgtgttcgtagggcctttgagtgtggcgattgtcatattctgttggataacaatgtattgggtgtcgattgtcatggggcaggggagagggcagtacacctggaggaccattttgtccacatcgacaccatcagtctgctcttagaggatgccctggagtattcggcgttgattgcggggcacccgaaatcagacttgccacctggactgtcgaggtgcagaccctgggagcaccactggcccatctcttacacaggctgaccgatttctcctggtgttcagagtctgtttttgtctagcaccatttgaaatcggttatgatgtagggggaaaagcagcagcctcgaagcctcatgccaactctgggcagcagcagcctgtggtttcctggaagatggatgggcagagaatagggaaggaagatcatgcttttccctactaacttctgtaactgcatgtatgatacattattgcagaggtaagagatagtttaatggatttttaaaaacaaattactataatttatctgatgttctctagttgcattttgctgaaatgtagtgctgttctaaattctgtaaattgattgctgttgaattatctttctgttgagaagagtctattcatgcatcctgaccttaataaatactatgttcagttaaaaaaaaaaaaaaaaaaaaaaaaaagggcggccgc

SEQ ID NO: 229 - protein, 106 aa, Homo sapiens
AGAEVVMLFLLTPSSHHQHECVRRAFECGDCHILLDNNVLGVDCHGAGERAVHLEDHFVHIDTISLLLEDALEYSALIAGHPKSDLPPGLSRCRPWEHHWPISYTG

SEQ ID NO: 230 - DNA, 657 bp, Homo sapiens
ccgaggcactgccaccaccagctctagcagggatgctcctgagcttggcggacatacttagatcctaacgtgccagtgagacctggctgtggagagtagcactggcagccctgcctggactccacttggcatgataccagctccagaagggaagggagtggagcaggcagtgaggagagagcctgggggtcggctggggacagccgtatgtgctaggtaggagtggagggagatatgtttaccaaatgcctgtcctgccatcctcccaggtagtcagagtgagctacatcctgccccgccttcatttccatggaaacatggcagctaggacacggggtacaacagcagccaaattcttccccacctcccttacttcgaaaaaaagtttggaaccctggtccctatactctgcagtcagaagtgggactgagccatacatgcccttgaattcctccctgtctggccctccctctccagcaagcagggttttctttaacttggcagtgtgcagaggagaagtggtaacacccccaccccattcccctgcatcggagctcagtattcctacagggtaagaggtaggaatcttgctgggacgaggggagccagaagtggcaataaaaagcgtgttgacctggaaaaaaaaaaaaaaaaaaa

SEQ ID NO: 231 - DNA, 1596 bp, Homo sapiens
tgtcggggacggtaaccgggacccgtgctctgctcctgtcgccttcgcctcctgaatccctagccatatgcgtgagtgcatctccatccacgttggccaggctggtgtccagattggcaatgcctgctgggagctctactgcctggaacacggcatccagcccgatggccagatgccaagtgacaagaccattgggggaggagatgactccttcaacaccttcttcagtgagacgggcgctggcaagcacgtgccccgggctgtgtttgtagacttggaacccacagtcattgatgaagttcgcactggcacctaccgccagctcttccaccctgagcagctcatcacaggcaaggaagatgctgccaataactatgcccgagggcactacaccattggcaaggagatcattgaccttgtgttggaccgaattcgcaagctggctgaccagtgcacccgtcttcagggcttcttggttttccacagctttggtgggggaactggttctgggttcacctccctgctcatggaacgcctgtcagttgattatggcaagaaatccaagctggagttctccatttacccggcaccccaggtttccacagctgtagttgagccctacaactccatcctcaccacccacaccaccctggagcactctgattgtgccttcatggtagacaatgaggccatctatgacatctgtcgtagaaacctcgatatcgagcgcccaacctacactaaccttaaccgccttattagccagattgtgtcctccatcactgcttccctgagatttgatggagccctgaatgttgacctgacagaattccagaccaacctggtcccctacccccgcatccacttccctctggccacatatgcccctgtcatctctgctgagaaagcctaccatgaacagctttctgtagcagacatcaccaatgcttgctttgagccagccaaccagatggtgaaatgtgaccctggccatggtaaatacatggcttgctgcctgttgtaccgtggtgacgtggttcccaaagatgtcaatgctgccattgccaccatcaaaaccaagcgcacgatccagtttgtggattggtgccccactggcttcaaggttggcatcaactaccagcctcccactgtggtgcctggtggagacctggccaaggtacagagagctgtgtgcatgctgagcaacaccacagccattgctgaggcctgggctcgcctggaccacaagtttgacctgatgtatgccaagcgtgcctttgttcactggtacgtgggtgaggggatggaggaaggcgagttttcagaggcccgtgaagatatggctgcccttgagaaggattatgaggaggttggtgtggattctgttgaaggagagggtgaggaagaaggagaggaatactaattatccattccttttggccctgcagcatgtcatgctcccagaatttcagcttcagcttaactgacagatgttaaagctttctggttagattgttttcacttggtgatcatgtcttttccatgtgtacctgtaatatttttccatcatatctcaaagtaaagtcattaacatca

SEQ ID NO: 232 - protein, 451 aa, Homo sapiens
MRECISIHVGQAGVQIGNACWELYCLEHGIQPDGQMPSDKTIGGGDDSFNTFFSETGAGKHVPRAVFVDLEPTVIDEVRTGTYRQLFHPEQLITGKEDAANNYARGHYTIGKEIIDLVLDRIRKLADQCTRLQGFLVFHSFGGGTGSGFTSLLMERLSVDYGKKSKLEFSIYPAPQVSTAVVEPYNSILTTHTTLEHSDCAFMVDNEAIYDICRRNLDIERPTYTNLNRLISQIVSSITASLRFDGALNVDLTEFQTNLVPYPRIHFPLATYAPVISAEKAYHEQLSVADITNACFEPANQMVKCDPGHGKYMACCLLYRGDVVPKDVNAAIATIKTKRTIQFVDWCPTGFKVGINYQPPTVVPGGDLAKVQRAVCMLSNTTAIAEAWARLDHKFDLMYAKRAFVHWYVGEGMEEGEFSEAREDMAALEKDYEEVGVDSVEGEGEEEGEEY

SEQ ID NO: 233 - DNA, 397 bp, Homo sapiens
ataatcacctgggtatattttattagggaaaaatgacaatattgataataaaaagagaaaggaaaaatgaaaatgcatctcagaccagaataccataacaaaacttttgtggaagctgcattttatttgaaaatccacccattttgctaacatacattttaatattgtaaacaaaaatagaatctgcagagacaatgcaacaagaatgcttaaactcatgtacagaattgctttcctacaatgaactgtccttcttaaggcccctctccacccaaatgttaaagatgtatttacacaaagcaccgatcaacagtgcagtttaattcttcgtttactaaactcttggctagacattaactttaaagatactatttccccttatttaaaaggtatatga

SEQ ID NO: 234 - DNA, 872 bp, Homo sapiens
  Unsure 422,847,856,872: Unknown base
cagtatttccctcagtactgtaagcaaaagtggtatgtttttctttctttatgtctactctgtcctctgtggccttctggtgtacccctctcttcctagccattcagtctctctagtcacctccctagtagctagtgctctctaagtttttatttaattagaacaactccatttccatttcaaggtaggtcaatggggggaaaagcctcatgatttaaactgaagttaacaacacagcttttaaaatgaaaactcatactccaacttctaaagtatatttgagctgatttgtttccaaaacaaagatatgctgtacctaaaactgctaaaacaaaaatataaagacaaggactaggtgattaaggggagagaaaaatcatytcttttccaggaaacctttgctaaaataagcaaaacttgantctatgcttcatggaaactgacacaaagaaaagaaactgatggattgcacaggccttgttatagaaatagatctataaaaagatctgtccacaggaaatatacaccttctcctggttctgaacttcaatggggatttgtcacctaggtctccatctataggaataccttcacatacctatctattcatgcacatattctgaaaacaggtacatacaaaattacaacaaaggaaaaaaattctattgaacacttaaaaatagaaacaggccaggcacggtggctcatgctgtaatcccaacaatttgggaggctgaggctggtggatcacctgaggtcaggagtgtgagaccagcttggccaacatggtgaaaccccgtcactactaaaaatacaaaaaaaattagcctgtgtggtggcacactcntacaatccnggctgactcgggaaan

SEQ ID NO: 235 - protein, 36 aa, Homo sapiens
MFFFLYVYSVLCGLLVYPSLPSHSVSLVTSLVASAL

SEQ ID NO: 236 - DNA, 5226 bp, Homo sapiens
aaaatacttgccctttggaaaaaaatcattctggcgtccacattcagactggtttagaggagagtaatactgaagacatgcccccccgaatcaaggtagcaattgcggagatgaaaagaaatgagtccaaaagatgcttaaatgtgaccattgaacaggatttgactcattggatatgaggccatggagcagtgtctggctaggtggatggatgttggtgctgtttagttaaataggaaactggaagagaagcaggcttgcaagaatggtaatattttggacgtgtaacttgtctggcaagatgttgaagaggtaaaggaggcagcacagcatcatgggccttggaggcagaagccgctttgatttactcagaacaccaaatcagtctccattttcttgactcagactacacccaagagattgcttccttccctgtgcttcctggccacttgctactctagctaggaagatctgcctcccttagctgaagtctaagatgtgtagcttattgatgcctctcctcttcttgttctgctgttgctgaatataatggggatgccagggcagacataccattcaacttgaatcttccttacccactttgtatagtcttacatgtcattgataccttgttttctggtacgcctaaaaggagtagaacttcaagtggtatttaaaagctttaagaaaagtcaaatttttacttttttcttcccatctgaggcatggatttattttctttttaaagaaatccaaatttttaaaagaagggatcttatttttaaaacgaagatcgataatatctactatgtactaaatgtcattctttaaaagttgttccctcataatttagtaaattacttccttttttaaaaaaaggaaagaaagagtgtttgtcttacaggctaacatcacaaacaataagtttcttctcatccatctccatttataaactagtgtgactgtcttctgagcacagtattaaacctggacagggagagggagggtgttagagaatgagagggaaagagagagaatacctacatataaggtgaccctaaagaaaagcctttcacccttcggaagatcttttcattttcatttttcttttttcaaacaccaacttgtaccagagggaagatctttttttaaaagcgtttcactaaaatttgtaaggaaataatgagctagataaaatattacagtgtttatttaatgaatttactcatatttaaaataatatctaaaaagagtaatttaggaatattgaggcaatgagacttgaaggttataaatagtggcagtgagaaaaggaatattatagataagctgttgaaaagaaaagatgctaagttttctagtgcttccttctgtttccaagggattatagaaatcggagtttgtttgacctgtttcacaggcatctcctttgtggactcattgtgtctcttccttaggctaatagtcaccatttatcatggacggttgtcatgagtgttgaagcacacttaacctgcttcgtcagagggtacttggcatcaccggtgcacagctggtgtcctagcaggagactaactagctgacacaccgtgctttgttagcctaataatcttatttgttaaaacttgccatttgttggatttttctattttaccccattataaacttcttattgagatcagatgacttctgaatagcatttgctgtatttttccaaggtaaagaatatctttttcagatttttctttctttctttaatgtcagaaatagaagaaatcttttctaccgaccttgtgccaggagatgtcatggtcattccattaaatgggacaataatgccttgtgatgctgtgcttattaatggtacctgcattgtaaacgaaagcatgttaacaggagaaagtgttccagtgacaaagactaatttgccaaatccttcagtggatgtgaaaggaataggagatcaattatataatccggaaacacataaacgacatactttgttttgtgggacaactgttattcagactcgtttctacactggagaactcgtcaaagccatagttgttagaacaggatttagtacttccaaaggacagcttgttcgttccatattgtatcccaaaccaactgattttaaactctacagagatgcctacttgtttctactatgtcttgtggcagttgctggcattgggtttatctacactattattaatagcattttaaatgaggtacaagttggggtcataattatcgagtctcttgatattatcacaattactgtgccccctgcacttcctgctgcaatgactgctggtattgtgtatgctcagagaagactgaaaaaaatcggtattttctgtatcagtcctcaaagaataaatatttgtggacagctcaatcttgtttgctttgacaagactggaactctaactgaagatggtttagatctttgggggattcaacgagtggaaaatgcacgatttctttcaccagaagaaaatgtgtgcaatgagatgttggtaaaatcccagtttgttgcttgtatggctacttgtcattcacttacaaaaattgaaggagtgctctctggtgatccacttgatctgaaaatgtttgaggctattggatggattctggaagaagcaactgaagaagaaacagcacttcataatcgaattatgcccacagtggttcgtcctcccaaacaactgcttcctgaatctacccctgcaggaaaccaagaaatggagctgtttgaacttccagctacttatgagataggaattgttcgccagttcccattttcttctgctttgcaacgtatgagtgtggttgccagggtgctgggggataggaaaatggacgcctacatgaaaggagcgcccgaggccattgccggtctctgtaaacctgaaacagttcctgtcgattttcaaaacgttttggaagacttcactaaacagggcttccgtgtgattgctcttgcacacagaaaattggagtcaaaactgacatggcataaagtacagaatattagcagagatgcaattgagaacaacatggattttatgggattaattataatgcagaacaaattaaagcaagaaccccctgcagtacttgaagatttgcataaagccaacattcgcaccgtcatggtcacaggtgacagtatgttgactgctgtctctgtggccagagattgtggaatgattctacctcaggataaagtgattattgctgaagcattacctccaaaggatgggaaagttgccaaaataaattggcattatgcagactccctcacgcagtgcagtcatccatcagcaattgacccagaggctattccggttaaattggtccatgatagcttagaggatcttcaaatgactcgttatcattttgcaatgaatggaaaatcattctcagtgatactggagcattttcaagaccttgttcctaagttgatgttgcatggcaccgtgtttgcccgtatggcacctgatcagaagacacagttgatagaagcattgcaaaatgttgattattttgttgggatgtgtggtgatggcgcaaatgattgtggtgctttgaagagggcacacggaggcatttccttatcggagctcgaagcttcagtggcatctccctttacctctaagactcctagtatttcctgtgtgccaaaccttatcagggaaggccgtgctgctttaataacttcctcctgtgaattagcactattttctatagttacttattctctggatcattttataatttccatattaatttcaagtatgctcgtgttattcttcagtgatttccacaattgtgcattttattctttggtttaagtactgaagcatataatgaaagtaattgctaagtagcagcttaaaaattcaattatccgattgtatttaacatctttaagagcatgatcataaagagctatttttgacaccccccccccacttttttaacatttagagttagtaagggttttatatctcttctgtccatattgttttcaaaggaatgaggtgtttaggtggctggaaaagcatttgtaggaagttagatttgaatatagacaaggtgggttattcacgttgagaatgttatttgaagaatgcctgtgaagccaggtgtgggttctactcagtgccatagatagactgagtcttctctcgtaggttaccattacatagtaattttgattctgaatttcacattaaattatttgagtttatacagacctaaattttaaaatctgtacatatattattttgatgtattaagatgaatattgctgatttaaattttatttatgcacatacttaaaggacagaaatgtctgggaaagtaattgttaaataatgatatgtaactttttaactttttaaataaataacaagatttttaatgtgtgtctccctcagggttgtttaaagttttttttctccctcaagtataaatagtggtaactatatgttttgtatcttctagcaccaactgctgtaaagcaatgctgcaaataatgcttgaatacaagtggctaagccaacaacagaataaatacttttatagtagttttataatcctgaaattcgaaagctttcccaattgcacttgcatctaaacaaaactgttgcagtttttactctatttattttgttccccatgtttatgaaagtcctgcacagtttcaaaggcatggtaaataatatatcaatgtttatgtagtctgttacagaaacagctatagataacattatccagtgaagagcaaaattcaagctttagaaaatattcatgcatgcaattttgacatatctaaaaataggtttttgtatatttatggtgggaggtggttgggaacttttaacaaaatggggtgttaatttttgtacagtctgtgggcatttacacatttttaatgtattaaaatttggtaattatgtgtacattaaattaataaaagttacttctagttatgatttgtgaattccctaagaccttggatttttttaagtaactttatatcagaaatgatactgcatctttatatttttaaaattgtattgctgctcaagaatggtaccctcttgtcaaaaaggcatacattcataattgtacattcagcattgtaaataatcttatgaaaccttttttgattgaagctattcaaaataaaaattttaatgaatgaaataa

SEQ ID NO: 237 - protein, 701 aa, Homo sapiens
MSEIEEIFSTDLVPGDVMVIPLNGTIMPCDAVLINGTCIVNESMLTGESVPVTKTNLPNPSVDVKGIGDQLYNPETHKRHTLFCGTTVIQTRFYTGELVKAIVVRTGFSTSKGQLVRSILYPKPTDFKLYRDAYLFLLCLVAVAGIGFIYTIINSILNEVQVGVIIIESLDIITITVPPALPAAMTAGIVYAQRRLKKIGIFCISPQRINICGQLNLVCFDKTGTLTEDGLDLWGIQRVENARFLSPEENVCNEMLVKSQFVACMATCHSLTKIEGVLSGDPLDLKMFEAIGWILEEATEEETALHNRIMPTVVRPPKQLLPESTPAGNQEMELFELPATYEIGIVRQFPFSSALQRMSVVARVLGDRKMDAYMKGAPEAIAGLCKPETVPVDFQNVLEDFTKQGFRVIALAHRKLESKLTWHKVQNISRDAIENNMDFMGLIIMQNKLKQEPPAVLEDLHKANIRTVMVTGDSMLTAVSVARDCGMILPQDKVIIAEALPPKDGKVAKINWHYADSLTQCSHPSAIDPEAIPVKLVHDSLEDLQMTRYHFAMNGKSFSVILEHFQDLVPKLMLHGTVFARMAPDQKTQLIEALQNVDYFVGMCGDGANDCGALKRAHGGISLSELEASVASPFTSKTPSISCVPNLIREGRAALITSSCELALFSIVTYSLDHFIISILISSMLVLFFSDFHNCAFYSLV

SEQ ID NO: 238 - DNA, 2042 bp, Homo sapiens
ggctgtggaacggcggggaggaggagccgccgaggagaccccgggcgaggagctgcgagccggaggaggccgcgcggactccgggctttccgccgtcgcggggatctcggggggcaaagggatcgccggggagggggaccagagagccgcgcccgccgcgcggagcgccccttcgcgtcccctgcaccatgagctggggcaccgagctctgggatcagtttgacaacttagaaaaacacacacagtggggaattgatattcttgagaaatatatcaagtttgtgaaagaaaggacagagattgaactcagctatgcaaagcaactcaggaatctttcaaagaagtaccaacctaaaaagaactcgaaggaggaagaagaatacaagtatacgtcatgtaaagctttcatttccaacctgaacgaaatgaatgattacgcagggcagcatgaagttatctccgagaacatggcatcacagatcattgtggacttggcacgctatgttcaggaactgaaacaggagaggaaatcaaactttcacgatggccgtaaagcacagcagcacatcgagacttgctggaagcagcttgaatctagtaaaaggcgatttgaacgcgattgcaaagaggcggacagggcgcagcagtactttgagaaaatggacgctgacatcaatgtcacaaaagcggatgttgaaaaggcccgacaacaagctcaaatacgtcaccaaatggcagaggacagcaaagcagattactcatccattctccagaaattcaaccatgagcagcatgaatattaccatactcacatccccaacatcttccagaaaatacaagagatggaggaaaggaggattgtgagaatgggagagtccatgaagacatatgcagaggttgatcggcaggtgatcccaatcattgggaagtgcctggatggaatagtaaaagcagccgaatcaattgatcagaaaaatgattcacagctggtaatagaagcttataaatcagggtttgagcctcctggagacattgaatttgaggattacactcagccaatgaagcgcactgtgtcagataacagcctttcaaattccagaggagaaggcaaaccagacctcaaatttggtggcaaatccaaaggaaagttatggccgttcatcaaaaaaaataagcttatgtcccttttaacatccccccatcagcctccccctccccctcctgcctctgcctcaccctctgctgttcccaacggcccccagtctcccaagcagcaaaaggaacccctctcccaccgcttcaacgagttcatgacctccaaacccaaaatccactgcttcaggagcctaaagcgtgggctttctctcaagctgggtgcaacaccggaggatttcagcaacctcccacctgaacaaagaaggaaaaagctgcagcagaaagtcgatgagttaaataaagaaattcagaaggagatggatcaaagagatgccataacaaaaatgaaagatgtctacctaaagaatcctcagatgggagacccagccagtttggatcacaaattagcagaagtcagccaaaatatagagaaactgcgagtagagacccagaaatttgaggcctggctggctgaggttgaaggccggctcccagcacgcagcgagcaggcgcgccggcagagcggactgtacgacagccagaacccacccacagtcaacaactgcgcccaggaccgtgagagcccagatggcagttacacagaggagcagagtcaggagagtgagatgaaggtgctggccacggattttgacgacgagtttgatgatgaggagcccctccctgccatagggacgtgcaaagctctctacacatttgaaggtcagaatgaaggaacgatttccgtagttgaaggagaaacattgtatgtcatagaggaagacaaaggcgatggctggacccgcattcggagaaatgaagatgaagagggttatgtccccacttcatatgtcgaagtctgtttggacaaaaatgccaaagattcctag

SEQ ID NO: 239 - protein, 679 aa, Homo sapiens
LWNGGEEEPPRRPRARSCEPEEAARTPGFPPSRGSRGAKGSPGRGTREPRPPRGAPLRVPCTMSWGTELWDQFDNLEKHTQWGIDILEKYIKFVKERTEIELSYAKQLRNLSKKYQPKKNSKEEEEYKYTSCKAFISNLNEMNDYAGQHEVISENMASQIIVDLARYVQELKQERKSNFHDGRKAQQHIETCWKQLESSKRRFERDCKEADRAQQYFEKMDADINVTKADVEKARQQAQIRHQMAEDSKADYSSILQKFNHEQHEYYHTHIPNIFQKIQEMEERRIVRMGESMKTYAEVDRQVIPIIGKCLDGIVKAAESIDQKNDSQLVIEAYKSGFEPPGDIEFEDYTQPMKRTVSDNSLSNSRGEGKPDLKFGGKSKGKLWPFIKKNKLMSLLTSPHQPPPPPPASASPSAVPNGPQSPKQQKEPLSHRFNEFMTSKPKIHCFRSLKRGLSLKLGATPEDFSNLPPEQRRKKLQQKVDELNKEIQKEMDQRDAITKMKDVYLKNPQMGDPASLDHKLAEVSQNIEKLRVETQKFEAWLAEVEGRLPARSEQARRQSGLYDSQNPPTVNNCAQDRESPDGSYTEEQSQESEMKVLATDFDDEFDDEEPLPAIGTCKALYTFEGQNEGTISVVEGETLYVIEEDKGDGWTRIRRNEDEEGYVPTSYVEVCLDKNAKDS

SEQ ID NO: 240 - DNA, 2679 bp, Homo sapiens
tctaggccggcagcgcctctcctccatggtcctgtctgtcagcgctgttttgggagcccgccggtgaggccgggccacgctcagacacttcgatcgtcgagtctgtcactgggcatggcgggtcagttccgcagctacgtgtgggacccgctgctgatcctgtcgcagatcgtcctcatgcagaccgtgtattacggctcgctgggcctgtggctggcgctggtggacgggctagtgcgaagcagcccctcgctggaccagatgttcgacgccgagatcctgggcttttccacccctccaggccggctctccatgatgtccttcatcctcaacgccctcacctgtgccctgggcttgctgtacttcatccggcgaggaaagcagtgtctggatttcactgtcactgtccatttctttcacctcctgggctgctggttctacagctcccgtttcccctcggcgctgacctggtggctggtccaagccgtgtgcattgcactcatggctgtcatcggggagtacctgtgcatgcggacggagctcaaggagatacccctcaactcagcccctaaatccaatgtctagaatcaggccctttggacatcctgctgacacttgggccccttaacaccttgggctgctcagaccctccagatgaggtccagcccagatctgagaggaaccctggaaatgtgaagtctctgttggtttgggagagatagtgagggcctgtcaaagaaggcaggtagcagtcagcatgacagctgcaagaatgacctctgtctgttgaagccttggtatctgagaggtcaggaaggggacctctttgagggtaataacagaattggaaccatgccactcttgagccacaatacctgtcaccagcctgttgttttaagagagaaaaaaaatcaaggatatctgattggagcaaaccacttctttagtcatctgtcttacccccctgggacagctgttacctttgcagtgttgccgaatcacagcagttacctttgcagtgttgccgaatcacagcagttctgttggagaaacgcttggtttccggatccagagccacagaaagaaatgtaggtgtgaagtattaggctgctgtcagggagaggatggcagatggaggcatcaagcacaaggaaaatgcacaacctgtgccctgttatacacacgttcatgtgcacccaagaacctatgactttcttccagttccttctaccaggtccccatcctgctgccagctctcaacatagcaggccataggacccagagaagaatcccagcgttgctcaaagtctaaccatcataaagacactgcctgtcttctaggaatgaccaggcacccagctcccactggactccaattttttttcctgccttatttagaattctttggcgggaagggtatgatgggttcccagagacaagaagcccaaccttctggcctgggctgtgctgatagtgctgagggagataggaatttgctgctaagatttttctttggggtggagtttcctctgtgaggggcttgcagctatccttcctgtgtatacaaatacagtattttccatggttctgcctgcacttactttgtaatgccacggttgagattgagagagatcagcgcagccaggcaagggaactttaaagaattattaggccaccttctccctttcctggaccccagagtcattcctccatttggttaaaatactcagtgcagggaactcttacatcctgtctccttcacttgcagcgtcccctgctatgcctcaggtgaaccacataattcttgggtttccgttcctacttgctagtgatttctgaacatgttcaatggagcggcacacagtctagacccacttccgcattgaaaccttcactgttcctctttggtttcttcagagctttcccaagagagctgtcagttttcagctgtcagtaacacaaatgagtttatggtaacacaaatgagttttgctatctctctgagaagctcatctgacctcctgactctcagccctacagagtagggagttgatgctgacaggatgaagatttaggaataaatatgcctgggaagagactgggaaggttctagggtgaggcacctcagtaactcatggtaccttggccaagttggaaggaagcagtttgttaatgaggcacagtaatcctggctgcagggtctaggaggtaagaccagctgggatgaccttccctgggttaatcaatttccctctagacaacacaaactgcaggcatgtgactaactttgaaagaacacccatcatgtggctgctgtcacccttgaccagccgtggtggtggttactccatctgtggttggagcgcctctttgggattcacttcaaggtcttgtgcctatttttctgcatatcttctgtgatgacaaatctctgtcccctgagtgttaatttgatttttagaaatggccaaaagtcacgtgatccaaactttttttcagtaatatggagactgagctgcatggtagttggggatcaaaaatatgtgaccttaatgagatttttatgatttctaaagtaacaataaaagcagtttttagagttgagttccagagagggcagggcaatggcagtgacatgtttgtcattttaataataaataacatctattgagtgcttaa

SEQ ID NO: 241 - DNA, 1448 bp, Homo sapiens
tcgacccacgcgtccggggaaggaaaacctccaaacacaagaggaatttggctatcactggaggagtgactttgtcggtcattgcatccccagttattgctgcagttagtgttggtattggtgtccccattatgctggcatatgtttatggggttgtgcccatttctctttgtcgtggaggtggctgtggagttagcacagccaacggaaaaggagtgaaaattgaatttgatgaagatgatggtccaatcacagtggcagatgcctggagagccctcaagaatcccagcattggggaaagcagcattgaaggcctgactagtgtattgagcactagtggaagccctacagatggacttagtgttatgcaaggtccttacagcgaaacggccagctttgcagccctctcagggggcacgctgagtggcggcattctctccagtggcaagggaaaatatagcaggttagaagttcaagccgatgtccaaaaggaaattttccccaaagacacagccagtcttggtgcaattagtgacaacgcaagcactcgtgctatggccggttccataatcagttcctacaacccacaggacagagaatgcaacaatatggaaatccaagtggacattgaagccaaaccaagccactatcagctggtgagtggaagcagcacggaggactcgctccatgttcatgctcagatggcagagaatgaagaagaaggtagtggtggcggaggcagtgaagaggatcccccctgcagacaccaaagctgtgaacagaaagactgcctggccagcaaaccttgggacatcagcctggcccagcctgaaagcatccgcagtgacctagagagttctgatgcacagtcagacgatgtgccagacatcacctcagatgagtgtggctccccccgctcccatactgcagcctgcccctcgacccccagagcccaaggtgcaccgagcccaagtgcccatatgaacctctctgccctagccgagggacaaactgtcttgaagccagaaggtggagaagccagagtatgaagtggaatgaatgctcctgttctgagaagcacacttgtaactgcatcttttggaatttttttttttttttttccaaggggtagagatttatgtattttatttcacagattctctggtcacaggtttttgcccagggaaattctgagaaattcacaatttcttaccagataaaacatgaaaagtttgccgttagttcccctcccctcccctccctctttttagttttaatttattagttaaactgatggcagcaatccatgaggtgtgtcaaagagtgtacatatgtatgtgtgtatattgaatgctaaacatattactgaaagacacattttaataaagatttctgtcataaaaaaaaaaaaaaaaaaaaaaaaaaaaaaaaaaaaaaaaaaaaaaaaa

SEQ ID NO: 242 - DNA, 3362 bp, Homo sapiens
agactccctgtctttgcggtttgggagatgatgagaaaccacagaattgctagtagtttatgtggagatcaggtcttctccaagaaaaaaaaaaagaaaaaaaaaaacaacatggctgcaaaggagaaactggaggcagtgttaaatgtggccctgagggtgccaagcatcatgctgttggatgtcctgtacagatgggatgtcagctcctttttccagcagatccaaagaagtagccttagtaataaccctcttttccagtataagtatttggctcttaatatgcattatgtaggttatatcttaagtgtggtgctgctaacattgcccaggcagcatctggttcagctttatctatattttttgactgctctgctcctctatgctggacatcaaatttccagggactatgttcggagtgaactggagtttgcctatgagggaccaatgtatttagaacctctctctatgaatcggtttaccacagccttaataggtcagttggtggtgtgtactttatgctcctgtgtcatgaaaacaaagcagatttggctgttttcagctcacatgcttcctctgctagcacgactctgccttgttcctttggagacaattgttatcatcaataaatttgctatgatttttactggattggaagttctctattttcttgggtctaatcttttggtaccttataaccttgctaaatctgcatacagagaattggttcaggtagtggaggtatatggccttctcgccttgggaatgtccctgtggaatcaactggtagtccctgttcttttcatggttttctggctcgtcttatttgctcttcagatttactcctatttcagtactcgagatcagcctgcatcacgtgagaggcttcttttcctttttctgacaagtattgcggaatgctgcagcactccttactctcttttgggtttggtcttcacggtttcttttgttgccttgggtgttctcacactctgcaagttttacttgcagggttatcgagctttcatgaatgatcctgccatgaatcggggcatgacagaaggagtaacgctgttaatcctggcagtgcagactgggctgatagaactgcaggttgttcatcgggcattcttgctcagtattatccttttcattgtcgtagcttctatcctacagtctatgttagaaattgcagatcctattgttttggcactgggagcatctagagacaagagcttgtggaaacacttccgtgctgtaagcctttgtttatttttattggtattccctgcttatatggcttatatgatttgccagtttttccacatggatttttggcttcttatcattatttccagcagcattcttacctctcttcaggttctgggaacactttttatttatgtcttatttatggttgaggaattcagaaaagagccagtggaaaacatggatgatgtcatctactatgtgaatggcacttaccgcctgctggagtttcttgtggccctctgtgtggtggcctatggcgtctcagagaccatctttggagaatggacagtgatgggctcaatgatcatcttcattcattcctactataacgtgtggcttcgggcccagctggggtggaagagctttcttctccgcagggatgctgtgaataagattaaatcgttacccattgctacgaaagagcagcttgagaaacacaatgatatttgtgccatctgttatcaggacatgaaatctgctgtgatcacgccttgcagtcattttttccatgcaggctgtcttaagaaatggctgtatgtccaggagacctgccctctgtgccactgccatctgaaaaactcctcccagcttccaggattaggaactgagccagttctacagcctcatgctggagctgagcaaaacgtcatgtttcaggaaggtactgaacccccaggccaggagcatactccagggaccaggatacaggaaggttccagggacaataatgagtacattgccagacgaccagataaccaggaaggggcttttgaccccaaagaatatcctcacagtgcgaaagatgaagcacatcctgttgaatcagcctagaggagaagcagcaggaatgatgctttgatactctggaggagaagttaactcaagatggaattcatgttctgatttgaggaatgaaaatgagatgatcaggcaggaaactgacattccaaggatctaatccaggaagtactctcagtggggaccacctgctttcatcccctgacattgtgggagaaattttgcaatgtatgctaatcaaaatgtatttatatgttctctgctgatgttttatagaggtttgtgaagaaaattcaacctcagcaacttcagaaactgcccctgatacgtgtgagagagaaataaaatcagattttgagtgttgaagggactgaggaagtgaggataaagagcatgaggacagcatggaaagaaggaggcagaagtggaactgaactttcactctccatgggacagatcaatctcattatcaagtctgaatagcaaccagccctctcctccaccccgtttctcctcagttaattggagctcagtcaggtgattattgagtcttgtacagcactgaaatgaaatcaaagatgaagaagcattgattgtattcgaagattgaagcacgctcatactttgtatgtgctttagggaaggggtgggtgggcacttgggccttgcgggtgcattcatgtaatctgagactcttgaactttatgacggagtcttcaatattttgatgtatatgaaacttttgttaaatatgttgtatacttcgctggctgtgtgaagtaaactaaaactctgatgaacactttggagtctgctttagtgaaggagaccaaagtgggaagggctttagggcactgatagaggccctgggtgtacttttcaatcctgtgtaatgtttaattcttgcaactgaatcaaaacagtgttaaattatggcaatatttgcactttgggaatgagtacataactgtatgatcacactctgcaaatgccacttttaaagctgttaatagactttgcaccttttctttgacaaggatgtgtcatatttaaatttttacattcatcatggctacaggtagaactggggaggggggaatgtaattttttatgggaattttgatatgaaaagaaactagtcatttatttatacaataggcttggctcaaaaagtgtttttcagacctcggtattcctaatgtgggatgtgactttattttatttttagtagcaaatttggatgtagactgacagacatagctgaatgtcttaataaatttaaatttgaagat

SEQ ID NO: 243 - protein, 691 aa, Homo sapiens
MMRNHRIASSLCGDQVFSKKKKKKKKNNMAAKEKLEAVLNVALRVPSIMLLDVLYRWDVSSFFQQIQRSSLSNNPLFQYKYLALNMHYVGYILSVVLLTLPRQHLVQLYLYFLTALLLYAGHQISRDYVRSELEFAYEGPMYLEPLSMNRFTTALIGQLVVCTLCSCVMKTKQIWLFSAHMLPLLARLCLVPLETIVIINKFAMIFTGLEVLYFLGSNLLVPYNLAKSAYRELVQVVEVYGLLALGMSLWNQLVVPVLFMVFWLVLFALQIYSYFSTRDQPASRERLLFLFLTSIAECCSTPYSLLGLVFTVSFVALGVLTLCKFYLQGYRAFMNDPAMNRGMTEGVTLLILAVQTGLIELQVVHRAFLLSIILFIVVASILQSMLEIADPIVLALGASRDKSLWKHFRAVSLCLFLLVFPAYMAYMICQFFHMDFWLLIIISSSILTSLQVLGTLFIYVLFMVEEFRKEPVENMDDVIYYVNGTYRLLEFLVALCVVAYGVSETIFGEWTVMGSMIIFIHSYYNVWLRAQLGWKSFLLRRDAVNKIKSLPIATKEQLEKHNDICAICYQDMKSAVITPCSHFFHAGCLKKWLYVQETCPLCHCHLKNSSQLPGLGTEPVLQPHAGAEQNVMFQEGTEPPGQEHTPGTRIQEGSRDNNEYIARRPDNQEGAFDPKEYPHSAKDEAHPVESA

SEQ ID NO: 244 - DNA, 926 bp, Homo sapiens
aaggggttccagtacttctctaccctggaagaagcagagaagcacctgaggcaggagccagggacccagccctacaacatcagagaagactccattctggaccaaaaggttgccctgctcaaggcataatggggccacccgtgggcatccacagtttgcagggtgttccggaaggttcttgtcactgtgattggatgctggatgccgcctgatagacatgctggcctggctgagaaacccctgagcaggtaacccagggaagagaaggaagccaggcctggaggtccacggcagtgggagtggggctcactggcttcctgtgggatgactggaaaatgacctcgctgctgttccctggcatgaccctctttggaagagtggtttggagagagccttctagaatgacagactgtgagaggaagcaggggcaggggtttccagcccgggctgtgcgaggcatcctggggctggcagcaccttcccggctcaccagtgccacctgcgggggagggacggggcaggcaggagtctgggaggcgggtccgctcctcttgtctgcggcatctgtgctctccgagagaaaaccaaggtgtgtcaaatgacgtcaagtctctatttaaaaataattttgtgttttctaaatggaaaaagtgatagctttggtgattttgtaaaagtcataaatgcttattgtaaaaaatacaggaaaccacccctcaccctgtccacttgggtgatcattccagacccctccccaaacatgcatatgtacctgtccgtcagtgtgtggatgtatgtttacagttctacataaatgggatcattttatacatggtgctctggaacccacatttttcatgcagtcatttgcagtgaattatttattgtgataataaatagcattagaatacaaaaaaaaaaaaaaa

SEQ ID NO: 245 - DNA, 2284 bp, Homo sapiens
cccctttatttccttcttgctttgcgtctttaacacctctcgaccctgtcctccccccgccactggaagtcttcccgtctctaaatggaattagtggagcccggagcctctggtgtaacgcacagacatgatccatgggcgcagcgtgcttcacattgtagcaagtttaatcatcctccatttgtctggggcaaccaagaaaggaacagaaaagcaaaccacctcagaaacacagaagtcagtgcagtgtggaacttggacaaaacatgcagagggaggtatctttacctctcccaactatcccagcaagtatccccctgaccgggaatgcatctacatcatagaagccgctccaagacagtgcattgaactttactttgatgaaaagtactctattgaaccgtcttgggagtgcaaatttgatcatattgaagttcgagatggaccttttggcttttctccaataattggacgtttctgtggacaacaaaatccacctgtcataaaatccagtggaagatttctatggattaaattttttgctgatggagagctggaatctatgggattttcagctcgatacaatttcacacctgggagactatttgtctacaagaaatctctggagtggctctcttaactaaaaaactctggccagtgatctacattgggaaagccatctcacttctgtgtgtaagagaagacatgtgtgttcagcatccaactcctcagagctgcgcaagcagatatcctgactttaaggaccttggagctttgaaaccattaccagcgtgtgagtttgagatgggcggttccgaaggaattgtggagtctatacaaattatgaaggaaggcaaagctactgctagcgaggctgttgattgcaagtggtacatccgagcacctccacggtccaagatttacttacgattcttggactatgagatgcagaattcaaatgagtgcaagaggaattttgtggctgtgtatgatggaagcagttccgtggaggatttgaaagctaagttctgtagcactgtggctaatgatgtcatgctacgcacgggtcttggggtgatccgcatgtgggcagatgagggcagtcgaaacagccgatttcagatgctcttcacatcctttcaagaacctccttgtgaaggcaacacattcttctgccatagtaacatgtgtattaataatactttggtctgcaatggactccagaactgtgtgtatccttgggatgaaaatcactgtaaagagaagaggaaaaccagcctgctggaccagctgaccaacaccagtgggactgtcattggcgtgacttcctgcatcgtgatcatcctcattatcatctctgtcatcgtacagatcaaacagcctcgtaaaaagtatgtccaaaggaaatcagactttgaccagacagttttccaggaggtatttgaacctcctcattatgagttatgcactctcagagggacaggagctacagctgactttgcagatgtggcagatgactttgaaaattaccataaactgcggaggtcatcttccaaatgcattcatgaccatcactgtggatcacagctgtccagcactaaaggcagccgcagtaacctcagcacaagagatgcttctatcttgacagagatgcccacacagccaggaaaacccctcatcccacccatgaacagaagaaatatccttgtcatgaaacacaactactcgcaagatgctgcagatgcctgtgacatagatgaaatcgaagaggtgccgaccaccagtcacaggctgtccagacacgataaagccgtccagcggttctgcctcattgggtctctaagcaaacatgaatctgaatacaacacaactagggtctagaaagaaaattcaagagaagaactatttatacaaacatggggactgtgaaaagaaaattctatagtgaattgtgaaaagtggacatatttctaaattcattccactgcctttatccaaacttaagaattacagacatttgttattccttcggcaagacatccccgctgcacactgatatgttcatttcgtaatttggttgctggccaccaagtgctccttagtttttaaatacattttgagattaactggaaacttgaagaagaaattagttcccgattaagactatcccaactttatttttattgtcagtttcacttttgtttctatgttgttttatgtctttgttatataattgtacattgtgtgatatgtgaaaaaaaaacacgaatttggatgaaccttg

SEQ ID NO: 246 - protein, 156 aa, Homo sapiens
MIHGRSVLHIVASLIILHLSGATKKGTEKQTTSETQKSVQCGTWTKHAEGGIFTSPNYPSKYPPDRECIYIIEAAPRQCIELYFDEKYSIEPSWECKFDHIEVRDGPFGFSPIIGRFCGQQNPPVIKSSGRFLWIKFFADGELESMGFSARYNFTP

SEQ ID NO: 247 - DNA, 3872 bp, Homo sapiens
cgctcgctcgcagagaagccgcggcccatggagcccgccggcccggcccccggccgcctcgggccgctgctctgcctgctgctcgccgcgtcctgcgcctggtcaggagtggcgggtgaggaggagctgcaggtgattcagcctgacaagtccgtgttggttgcagctggagagacagccactctgcgctgcactgcgacctctctgatccctgtggggcccatccagtggttcagaggagctggaccaggccgggaattaatctacaatcaaaaagaaggccacttcccccgggtaacaactgtttcagacctcacaaagagaaacaacatggacttttccatccgcatcggtaacatcaccccagcagatgccggcacctactactgtgtgaagttccggaaagggagccccgatgacgtggagtttaagtctggagcaggcactgagctgtctgtgcgcgccaaaccctctgcccccgtggtatcgggccctgcggcgagggccacacctcagcacacagtgagcttcacctgcgagtcccacggcttctcacccagagacatcaccctgaaatggttcaaaaatgggaatgagctctcagacttccagaccaacgtggaccccgtaggagagagcgtgtcctacagcatccacagcacagccaaggtggtgctgacccgcgaggacgttcactctcaagtcatctgcgaggtggcccacgtcaccttgcagggggaccctcttcgtgggactgccaacttgtctgagaccatccgagttccacccaccttggaggttactcaacagcccgtgagggcagagaaccaggtgaatgtcacctgccaggtgaggaagttctacccccagagactacagctgacctggttggagaatggaaacgtgtcccggacagaaacggcctcaaccgttacagagaacaaggatggtacctacaactggatgagctggctcctggtgaatgtatctgcccacagggatgatgtgaagctcacctgccaggtggagcatgacgggcagccagcggtcagcaaaagccatgacctgaaggtctcagcccacccgaaggagcagggctcaaataccgccgctgagaacactggatctaatgaacggaacatctatattgtggtgggtgtggtgtgcaccttgctggtggccctactgatggcggccctctacctcgtccgaatcagacagaagaaagcccagggctccacttcttctacaaggttgcatgagcccgagaagaatgccagagaaataacacaggacacaaatgatatcacatatgcagacctgaacctgcccaaggggaagaagcctgctccccaggctgcggagcccaacaaccacacggagtatgccagcattcagaccagcccgcagcccgcgtcggaggacaccctcacctatgctgacctggacatggtccacctcaaccggacccccaagcagccggcccccaagcctgagccgtccttctcagagtacgccagcgtccaggtcccgaggaagtgaatgggaccgtggtttgctctagcacccatctctacgcgctttcttgtcccacagggagccgccgtgatgagcacagccaacccagttcccggagggctggggcggtgcaggctctgggacccaggggccagggtggctcttctctccccacccctccttggctctccagcacttcctgggcagccacggccccctccccccacattgccacatacctggaggctgacgttgccaaaccagccagggaaccaacctgggaagtggccagaacttcctggggtccaagaactcttgtgcctccgtccatcaccatgtgggttttgaagaccctcgactgcctccccgatgctccgaagcctgatcttccagggtggggaggagaaaatcccacctcccctgacctccaccacctccaccaccaccaccaccaccaccaccaccactaccaccaccacccaactggggctagagtggggaagatttcccctttagatcaaactgccccttccatggaaaagctggaaaaaaactctggaacccatatccaggcttggtgaggttgctgccaacagtcctggcctcccccatccctaggctaaagagccatgagtcctggaggaggagaggacccctcccaaaggactggagacaaaaccctctgcttccttgggtccctccaagactccctggggcccaactgtgttgctccacccggacccatctctcccttctagacctgagcttgcccctccagctagcactaagcaacatctcgctgtggacgcctgtaaattactgagaaatgtgaaacgtgcaatcttgaaactgaggtgttagaaaacttgatctgtggtgttttgttttgttttttttcttaaaacaacagcaacgtgatcttggctgtctgtcatgtgttgaagtccatggttgggtcttgtgaagtctgaggtttaacagtttgttgtcctggagggattttcttacagcgaagacttgagttcctccaagtcccagaaccccaagaatgggcaagaaggatcaggtcagccactccctggagacacagccttctggctgggactgacttggccatgttctcagctgagccacgcggctggtagtgcagccttctgtgaccccgctgtggtaagtccagcctgcccagggctgctgagggctgcctcttgacagtgcagtcttatcgagacccaacgcctcagtctgctcatccgtaaagtggggatagtgaagatgacacccctccccaccacctctcataagcactttaggaacacacagagggtagggatagtggccctggccgtctatcctacccctttagtgaccgcccccatcccggctttctgagctgatccttgaagaagaaatcttccatttctgctctcaaaccctactgggatcaaactggaataaattgaagacagccagggggatggtgcagctgtgaagctcgggctgattccccctctgtcccagaaggttggccagagggtgtgacccagttaccctttaacccccacccttccagtcgggtgtgagggcctgaccgggcccagggcaagcagatgtcgcaagccctatttattcagtcttcactataactcttagagttgagacgctaatgttcatgactcctggccttgggatgcccaagggatttctggctcaggctgtaaaagtagctgagccatcctgcccattcctggaggtcctacaggtgaaactgcaggagctcagcatagacccagctctctgggggatggtcacctggtgatttcaatgatggcatccaggaattagctgagccaacagaccatgtggacagctttggccagagctcccgtgtggcatctgggagccacagtgacccagccacctggctcaggctagttccaaattccaaaagattggcttgtaaaccttcgtctccctctcttttacccagagacagcacatacgtgtgcacacgcatgcacacacacattcagtattttaaaagaatgttttcttggtgccattttcattttattttattttttaattcttggagggggaaataagggaataaggccaaggaagatgtatagctttagctttagcctggcaacctggagaatccacataccttgtgtattgaaccccaggaaaaggaagaggtcgaaccaaccctgcggaaggagcatggtttcaggagtttattttaagactgctgggaaggaaacaggccccattttgtatatagttgcaacttaaactttttggcttgcaaaatatttttgtaataaagatttctgggtaataaaaaaaaa

SEQ ID NO: 248 - protein, 504 aa, Homo sapiens
MEPAGPAPGRLGPLLCLLLAASCAWSGVAGEEELQVIQPDKSVLVAAGETATLRCTATSLIPVGPIQWFRGAGPGRELIYNQKEGHFPRVTTVSDLTKRNNMDFSIRIGNITPADAGTYYCVKFRKGSPDDVEFKSGAGTELSVRAKPSAPVVSGPAARATPQHTVSFTCESHGFSPRDITLKWFKNGNELSDFQTNVDPVGESVSYSIHSTAKVVLTREDVHSQVICEVAHVTLQGDPLRGTANLSETIRVPPTLEVTQQPVRAENQVNVTCQVRKFYPQRLQLTWLENGNVSRTETASTVTENKDGTYNWMSWLLVNVSAHRDDVKLTCQVEHDGQPAVSKSHDLKVSAHPKEQGSNTAAENTGSNERNIYIVVGVVCTLLVALLMAALYLVRIRQKKAQGSTSSTRLHEPEKNAREITQDTNDITYADLNLPKGKKPAPQAAEPNNHTEYASIQTSPQPASEDTLTYADLDMVHLNRTPKQPAPKPEPSFSEYASVQVPRK

SEQ ID NO: 249 - DNA, 1450 bp, Homo sapiens
cggaagttctggactgcagttgagtggaaatgggcaacggcgggcggagcggcctgcagcaggggaaggggaacgtggatggggtggcagcgactcctactgctgcctcggcctcctgccagtacaggtgcatcgaatgcaaccaggaggccaaagagttgtaccgagactataaccacggtgtgctgaagataaccatctgtaaatcctgccagaaacctgtagacaaatatatcgagtatgatcctgttatcatcttgattaatgctatattgtgcaaagctcaggcctacagacatattcttttcaatactcaaataaatatccatggaaaactctgcatattttgtttgctttgtgaagcatacctgaggtggtggcagcttcaagattccaaccagaatactgcccctgatgacttgatcagatatgctaaggaatgggatttctatagaatgtttgcgattgctgctttagaacaaactgcctattttattggcatttttaccttcctgtgggtagaacggcccatgacggcaaaaaaaaagcccaacttcattttgctgctgaaagcattattattatctagctacggaaaactcttgctgattccagctgtcatttgggaacatgactacacatctgtgtgcctcaaactcattaaagtatttgttcttacatcaaattttcaggcaattagagtgaccctaaacatcaaccgtaagctctccttcttggccgtgttgagtggcttactgctggaaagcatcatggtctacttcttccagagtatggaatgggatgttggaagtgattatgccatctttaaatctcaggacttctgaagagttttattcttcttcactatctgtggcatgaccagctgtatctgaaagagaaaagacatgaaatataaaccaacctcctcatttctgttgagtaaaatgaagcaaagattggaaacactttctgaaaaagaaagcaatgataatagcggtggatacccacccccacaaatgcacccaagagacaagccatttacatacagatattcacagtcacacatagaaacacccacatggacacaaggaatgttgctgcagagactgaatgacatgcaacaggtgaaggtttatacgttatacacaaggccaggtaagcgctcataattcacacataataaaacatctaggtttcattcctttgacatgtttatatctttttaatttaaatgttgttactggcttaaaatattttgtgttcttacaatagaaacgcttttaataaagtctttcagaataaaccaagtttttgtaaattttcaattcaataattaaggtaatctttaaaattggatgatccaaaaataagtgataatgaaaaccactgagttatatactttgcaagggtaaattacatctgaataaagctgtaattaaaaacaaaaaaa

SEQ ID NO: 250 - protein, 271 aa, Homo sapiens
MGNGGRSGLQQGKGNVDGVAATPTAASASCQYRCIECNQEAKELYRDYNHGVLKITICKSCQKPVDKYIEYDPVIILINAILCKAQAYRHILFNTQINIHGKLCIFCLLCEAYLRWWQLQDSNQNTAPDDLIRYAKEWDFYRMFAIAALEQTAYFIGIFTFLWVERPMTAKKKPNFILLLKALLLSSYGKLLLIPAVIWEHDYTSVCLKLIKVFVLTSNFQAIRVTLNINRKLSFLAVLSGLLLESIMVYFFQSMEWDVGSDYAIFKSQDF

SEQ ID NO: 251 - DNA, 1490 bp, Homo sapiens
ggggcagcgcagggcagacggcggcaggagaagcaagatgaatgcaggctcagatcctgtggtcatcgtctcggcggcgcggaccatcataggttccttcaatggtgccttagctgctgttcctgtccaggacctgggctccactgtcatcaaagaagtcttgaagagggccactgtggctccggaagatgtgtctgaggtcatctttggacatgtcttggcagcaggctgtgggcagaatcctgttagacaagccagtgtgggtgcaggaattccctactctgttccagcatggagctgccagatgatctgtgggtcaggcctaaaagctgtgtgccttgcagtccagtcaatagggataggagactccagcattgtggttgcaggaggcatggaaaatatgagcaaggctcctcacttggcttacttgagaacaggagtaaagataggtgagatgccactgactgacagtatactctgtgatggtcttacagatgcatttcacaactgtcatatgggtattacagctgaaaatgtagccacaaaatggcaagtgagtagagaagatcaggacaaggttgcagttctgtcccagaacaggacagagaatgcacagaaagctggccattttgacaaagagattgtaccagttttggtgtcaactagaaaaggtcttattgaagttaaaacagatgagtttcctcgccatgggagcaacatagaagccatgtccaagctaaagccttactttcttactgatggaacgggaacagtcaccccagccaatgcttcaggaataaatgatggtgctgcagctgttgctcttatgaagaagtcagaagctgataaacgtgggcttacacctttagcacggatagtttcctggtcccaagtgggtgtggagccttccattatgggaataggaccaattccagccataaagcaagctgttacaaaagcaggttggtcactggaagatgttgacatatttgaaatcaatgaagcctttgcagctgtctctgctgcaatagttaaagaacttggattaaacccagagaaggtcaatattgaaggaggggctatagccttgggccaccctcttggagcatctggctgtcgaattcttgtgaccctgttacacacactggagagaatgggcagaagtcgtggtgttgcagccctgtgcattgggggtgggatgggaatagcaatgtgtgttcagagagaatgacaatgtgtgttcagagagaatgaattgcttaaactttgaacaacctcaatttctttttaaactaataaagtactaggttgcaatatgtgaaatcagaggaccaaagtacagatggaaaccatttcctacatcacaaaaacccaagtttacagcttgtactttactttaatgtgtaatactcaactcacggtacaagacaattgcatttaacattgttataaataaaaggaacatcagatcaatcattaaaaaaaaaaaa

SEQ ID NO: 252 - protein, 397 aa, Homo sapiens
MNAGSDPVVIVSAARTIIGSFNGALAAVPVQDLGSTVIKEVLKRATVAPEDVSEVIFGHVLAAGCGQNPVRQASVGAGIPYSVPAWSCQMICGSGLKAVCLAVQSIGIGDSSIVVAGGMENMSKAPHLAYLRTGVKIGEMPLTDSILCDGLTDAFHNCHMGITAENVATKWQVSREDQDKVAVLSQNRTENAQKAGHFDKEIVPVLVSTRKGLIEVKTDEFPRHGSNIEAMSKLKPYFLTDGTGTVTPANASGINDGAAAVALMKKSEADKRGLTPLARIVSWSQVGVEPSIMGIGPIPAIKQAVTKAGWSLEDVDIFEINEAFAAVSAAIVKELGLNPEKVNIEGGAIALGHPLGASGCRILVTLLHTLERMGRSRGVAALCIGGGMGIAMCVQRE

SEQ ID NO: 253 - DNA, 2473 bp, Homo sapiens
aatcgcgaaacccggcgagcggcgcgctggctatcgagcgagcggggcggaaccgggagttgcgccgccgctcgggcgccgggctccgtcgcggccgcagccccgcgggtcgccctcccgtgcctcgcccgcggacaccctggccgtggacaccctggccgtgggcacccgcggggcgcggcgcgggcgctgcgcggcggcggcggcggcatgaaggtcacgtcgctcgacgggcgccagctgcgcaagatgctccgcaaggaggcggcggcgcgctgcgtggtgctcgactgccggccctatctggccttcgctgcctcgaacgtgcgcggctcgctcaacgtcaacctcaactcggtggtgctgcggcgggcccggggcggcgcggtgtcggcgcgctacgtgctgcccgacgaggcggcgcgcgcgcggctcctgcaggagggcggcggcggcgtcgcggccgtggtggtgctggaccagggcagccgccactggcagaagctgcgagaggagagcgccgcgcgtgtcgtcctcacctcgctactcgcttgcctacccgccggcccgcgggtctacttcctcaaagggggatatgagactttctactcggaatatcctgagtgttgcgtggatgtaaaacccatttcacaagagaagattgagagtgagagagccctcatcagccagtgtggaaaaccagtggtaaatgtcagctacaggccagcttatgaccagggtggcccagttgaaatccttcccttcctctaccttggaagtgcctaccatgcatccaagtgcgagttcctcgccaacttgcacatcacagccctgctgaatgtctcccgacggacctccgaggcctgcatgacccacctacactacaaatggatccctgtggaagacagccacacggctgacattagctcccactttcaagaagcaatagacttcattgactgtgtcagggaaaagggaggcaaggtcctggtccactgtgaggctgggatctcccgttcacccaccatctgcatggcttaccttatgaagaccaagcagttccgcctgaaggaggccttcgattacatcaagcagaggaggagcatggtctcgcccaactttggcttcatgggccagctcctgcagtacgaatctgagatcctgccctccacgcccaacccccagcctccctcctgccaaggggaggcagcaggctcttcactgataggccatttgcagacactgagccctgacatgcagggtgcctactgcacattccctgcctcggtgctggcaccggtgcctacccactcaacagtctcagagctcagcagaagccctgtggcaacggccacatcctgctaaaactgggatggaggaatcggcccagccccaagagcaactgtgatttttgtttttaagactcatggacatttcatacctgtgcaatactgaagacctcattctgtcatgctgccccagtgagatagtgagtggtcaccaggcttgcaaatgaacttcagacggacctcagggtaggttctcgggactgaaggaaggccaagccattacgggagcacagcatgtgctgactactgtacttccagacccctgccctcttgggactgcccagtccttgcacctcagagttcgccttttcatttcaagcataagccaataaatacctgcagcaacgtgggagaaagaagttgctggaccaggagaaaaggcagttatgaagccaattcattttgaaggaagcacaatttccaccttattttttgaactttggcagtttcaatgtctgtctctgttgcttcggggcataagctgatcaccgtctagttgggaaagtcaccctacagggtttgtagggacatgatcagcatcctgatttgaaccctgaaatgttgtgtagacaccctcttgggtccaatgaggtagttggttgaagtagcaagatgttggcttttctggattttttttgccatgggttcttcactgaccttggactttggcatgattcttagtcatacttgaacttgtctcattccacctcttctcagagcaactcttcctttgggaaaagagttcttcagatcatagaccaaaaaagtcataccttcgaggtggtagcagtagattccaggaggagaagggtacttgctaggtatcctgggtcagtggcggtgcaaactggtttcctcagctgcctgtccttctgtgtgcttatgtctcttgtgacaattgttttcctccctgcccctggaggttgtcttcaactgtggacttctgggatttgcagattttgcaacgtggtactacttttttttctttttgtctgttagttatttctccaggggaaaaggcaataattttctaagacccgtgtgaatgtgaagaaaagcagtatgttactggttgttgttgttgttcttgttttttatatgtaaaataaaaatagtgaaaggag

SEQ ID NO: 254 - protein, 384 aa, Homo sapiens
MKVTSLDGRQLRKMLRKEAAARCVVLDCRPYLAFAASNVRGSLNVNLNSVVLRRARGGAVSARYVLPDEAARARLLQEGGGGVAAVVVLDQGSRHWQKLREESAARVVLTSLLACLPAGPRVYFLKGGYETFYSEYPECCVDVKPISQEKIESERALISQCGKPVVNVSYRPAYDQGGPVEILPFLYLGSAYHASKCEFLANLHITALLNVSRRTSEACMTHLHYKWIPVEDSHTADISSHFQEAIDFIDCVREKGGKVLVHCEAGISRSPTICMAYLMKTKQFRLKEAFDYIKQRRSMVSPNFGFMGQLLQYESEILPSTPNPQPPSCQGEAAGSSLIGHLQTLSPDMQGAYCTFPASVLAPVPTHSTVSELSRSPVATATSC

SEQ ID NO: 255 - DNA, 1271 bp, Homo sapiens
ttctcactatactggtcctgaggaaagggcttctgtgaactgcggtttttagtttttattgtggttcttagttctcatgagacccctcttgaggatatgtgcctatctggtgcctctgctctccactagttgagtgaaaggaaggaggtaatttaccaccatgtttggttcctgtttataagatgttttaagaaagatttgaaacagattttctgaagaaagcagaagctctcttcccattatgacttcggaaatcacttatgctgaagtgaggttcaaaaatgaattcaagtcctcaggcatcaacacagcctcttctgcagcttccaaggagaggactgcccctcacaaaagtaataccggattccccaagctgctttgtgcctcactgttgatatttttcctgctattggcaatctcattctttattgcttttgtcattttctttcaaaaatattctcagcttcttgaaaaaaagactacaaaagagctggttcatacaacattggagtgtgtgaaaaaaaatatgcccgtggaagagacagcctggagctgttgcccaaagaattggaagtcatttagttccaactgctactttatttctactgaatcagcatcttggcaagacagtgagaaggactgtgctagaatggaggctcacctgctggtgataaacactcaagaagagcaggatttcatcttccagaatctgcaagaagaatctgcttattttgtggggctctcagatccagaaggtcagcgacattggcaatgggttgatcagacaccatacaatgaaagttccacattctggcatccacgtgagcccagtgatcccaatgagcgctgcgttgtgctaaattttcgtaaatcacccaaaagatggggctggaatgatgttaattgtcttggtcctcaaaggtcagtttgtgagatgatgaagatccacttatgaactgaacattctccatgaacaggtggttggattggtatctgtcattgtagggatagataataagctcttcttattcatgtgtaagggaggtccatagaatttaggtggtctgtcaactattctacttatgagagaattggtctatacattgactgattcactttttcataaagtgagcatttattgagcattttttcatgtgccagagcctgtactggaggcccccattgtgcacacagggagagaacatgagtctctcttaatttttatctggttgctaaagaattatttaccattaaattatatggtgtggtgt

SEQ ID NO: 256 - protein, 237 aa, Homo sapiens
MTSEITYAEVRFKNEFKSSGINTASSAASKERTAPHKSNTGFPKLLCASLLIFFLLLAISFFIAFVIFFQKYSQLLEKKTTKELVHTTLECVKKNMPVEETAWSCCPKNWKSFSSNCYFISTESASWQDSEKDCARMEAHLLVINTQEEQDFIFQNLQEESAYFVGLSDPEGQRHWQWVDQTPYNESSTFWHPREPSDPNERCVVLNFRKSPKRWGWNDVNCLGPQRSVCEMMKIHL

SEQ ID NO: 257 - DNA, 1014 bp, Homo sapiens
ttcctcagaaacgagcaaacctgaaagctactctctcagcttcagagggaaaaaatggttgtagatttctggacttgggagcagacatttcaagaactaatccaagaggcaaaaccccgggccacatggacgctgaagttggatggcaaccttcagctagactgcctggctcaagggtggaagcaataccaacagagagcatttggctggttccggtgttcctcctgccagcgaagttgggcttccgccaagttgcagattctgtgccacacgtactgggagcactggacatcccagggtcaggtgcgtatgaggctctttggccaaaggtgccagaagtgctcctggtcccaatatgagatgcctgagttctcctcggatagcaccatgaggattctgagcaacctggtgcagcatatactgaagaaatactatggaaatggcatgaggaagtctccagaaatgccagtaatcctggaagtgtccctggaaggatcccatgacacagccaattgtgaggcatgcactttgggcatatgtggacagggcttaaaaagctacatgacaaagccgtccaaatccctactcccccacctaaagactgggaattcctcacctggaattggtgctgtgtacctcgcaaaccaagccaagaaccagtcagatgaggcaaaagaggctaaggggagtgggtatgagaaattagggcccagtcgagacccagatccactgaacatctgtgtctttattttgctgcttgtatttattgtagtcaaatgctttacatcagaatgatgaaaataggcttgccactttctcttattttaattccatggtagtcaatgaactggctgccactttaatataactgaaaattcattttgagaccaagcaggatcaagtttgtagaataaacactggtttcctagctatcctctgaaaacagtatgaaacatgaccaagtacataatggatttagtaataaatattgtcgaattgctaaaaaaaaaaaaa

SEQ ID NO: 258 - protein, 246 aa, Homo sapiens
MVVDFWTWEQTFQELIQEAKPRATWTLKLDGNLQLDCLAQGWKQYQQRAFGWFRCSSCQRSWASAKLQILCHTYWEHWTSQGQVRMRLFGQRCQKCSWSQYEMPEFSSDSTMRILSNLVQHILKKYYGNGMRKSPEMPVILEVSLEGSHDTANCEACTLGICGQGLKSYMTKPSKSLLPHLKTGNSSPGIGAVYLANQAKNQSDEAKEAKGSGYEKLGPSRDPDPLNICVFILLLVFIVVKCFTSE

SEQ ID NO: 259 - DNA, 1714 bp, Homo sapiens
ggggcattttgtgcctgcctagctatccagacagagcagctaccctcagctctagctgatactacagacagtacaacagatcaagaagtatggcagtgacaactcgtttgacacggttgcacgaaaagatcctgcaaaatcattttggagggaagcggcttagccttctctataagggtagtgtccatggattccgtaatggagttttgcttgacagatgttgtaatcaagggcctactctaacagtgatttatagtgaagatcatattattggagcatatgcggaagagagttaccaggaaggaaagtatgcttccatcatcctttttgcacttcaagatactaaaatttcagaatggaaactaggactatgtacaccagaaacactgttttgttgtgatgttacaaaatataactccccaactaatttccagatagatggaagaaatagaaaagtgattatggacttaaagacaatggaaaatcttggacttgctcaaaattgtactatctctattcaggattatgaagtttttcgatgcgaagattcactggatgaaagaaagataaaaggggtcattgagctcaggaagagcttactgtctgccttgagaacttatgaaccatatggatccctggttcaacaaatacgaattctgctgctgggtccaattggagctgggaagtccagctttttcaactcagtgaggtctgttttccaagggcatgtaacgcatcaggctttggtgggcactaatacaactgggatatctgagaagtataggacatactctattagagacgggaaagatggcaaatacctgccgtttattctgtgtgactcactggggctgagtgagaaagaaggcggcctgtgcagggatgacatattctatatcttgaacggtaacattcgtgatagataccagtttaatcccatggaatcaatcaaattaaatcatcatgactacattgattccccatcgctgaaggacagaattcattgtgtggcatttgtatttgatgccagctctattcaatacttctcctctcagatgatagtaaagatcaaaagaattcgaagggagttggtaaacgctggtgtggtacatgtggctttgctcactcatgtggatagcatggatttgattacaaaaggtgaccttatagaaatagagagatgtgagcctgtgaggtccaagctagaggaagtccaaagaaaacttggatttgctctttctgacatctcggtggttagcaattattcctctgagtgggagctggaccctgtaaaggatgttctaattctttctgctctgagacgaatgctatgggctgcagatgacttcttagaggatttgccttttgagcaaatagggaatctaagggaggaaattatcaactgtgcacaaggaaaaaaatagatatgtgaaaggttcacgtaaatttcctcacatcacagaagattaaaattcagaaaggagaaaacacagaccaaagagaagtatctaagaccaaagggatgtgttttattaatgtctaggatgaagaaatgcatagaacattgtagtacttgtaaataactagaaataacatgatttagtcataattgtgaaaaatagtaataatttttcttggatttatgttctgtatctgtgaaaaaataaatttcttataaaactcggaaaaaaaaaaaaaaaaaaaaaaaaaaaaa

SEQ ID NO: 260 - protein, 444 aa, Homo sapiens
MAVTTRLTRLHEKILQNHFGGKRLSLLYKGSVHGFRNGVLLDRCCNQGPTLTVIYSEDHIIGAYAEESYQEGKYASIILFALQDTKISEWKLGLCTPETLFCCDVTKYNSPTNFQIDGRNRKVIMDLKTMENLGLAQNCTISIQDYEVFRCEDSLDERKIKGVIELRKSLLSALRTYEPYGSLVQQIRILLLGPIGAGKSSFFNSVRSVFQGHVTHQALVGTNTTGISEKYRTYSIRDGKDGKYLPFILCDSLGLSEKEGGLCRDDIFYILNGNIRDRYQFNPMESIKLNHHDYIDSPSLKDRIHCVAFVFDASSIQYFSSQMIVKIKRIRRELVNAGVVHVALLTHVDSMDLITKGDLIEIERCEPVRSKLEEVQRKLGFALSDISVVSNYSSEWELDPVKDVLILSALRRMLWAADDFLEDLPFEQIGNLREEIINCAQGKK

SEQ ID NO: 261 - DNA, 1865 bp, Homo sapiens
gagtgcgcacgcatcctgcccgcggcgcgcgcgcaggtcggtgcgtctgtcgggggcgcgctcgggtacctgtaccccacgtagtcgccggttaccgatcggactaagttccagtggtgatttacaagtcaagttaaaatgtccccagaagtggccttgaaccgaatatctccaatgctctcccctttcatatctagcgtggtccggaatggaaaagtgggactggatgctacaaactgtttgaggataactgacttaaaatctggctgcacatcattgactcctgggcccaactgtgaccgatttaaactgcacataccatatgctggagagacattaaagtgggatatcattttcaatgcccaatacccagaactgcctcccgattttatctttggagaagatgctgaattcctgccagacccctcagctttgcagaatcttgcctcctggaatccttcaaatcctgaatgtctcttacttgtggtgaaggaacttgtgcaacaatatcaccaattccaatgtagccgcctccgggagagctcccgcctcatgtttgaataccagacattactggaggagccacagtatggagagaacatggaaatttatgctgggaaaaaaaacaactggactggtgaattttcagctcgtttccttttgaagctgcccgtagatttcagcaatatccccacataccttctcaaggatgtaaatgaagaccctggagaagatgtggccctcctctctgttagttttgaggacactgaagccacccaggtgtaccccaagctgtacttgtcacctcgaattgagcatgcacttggaggctcctcagctcttcatatcccagcttttccaggaggaggatgtctcattgattacgttcctcaagtatgccacctgctcaccaacaaggtgcagtacgtgattcaagggtatcacaaaagaagagagtatattgctgcttttctcagtcactttggcacaggtgtcgtggaatatgatgcagaaggctttacaaaactcactctgctgctgatgtggaaagatttttgttttcttgtacacattgacctgcctctgtttttccctcgagaccagccaactctcacatttcagtccgtttatcactttaccaacagtggacagctttactcccaggcccaaaaaaattatccgtacagccccagatgggatggaaatgaaatggccaaaagagcaaagggatgccaggggagcagagatgcctgcagcccgtgggagcaagtcctggcctttgcagttgcaaaaactggctgcaagctgctccagccccagaggaactggccaagctccagagggcctccttggagggcctcagagggagagagaactgctcagtaattttgatcactttgggcttatttcaaaacctttgtccctcagttccaggaggcagcatttgccaatggaaagctctaggaaacaccagtcttgagaggtggccagccagactgcctgtccacatgcgtgtcagcacatacagccgcttcctggaagccgcctggaatgtcttcacggcagcgttttgctcacacagcagcttttgcacgccccaggcagccccgactgctgaaatccaacttgagctggctggtggtccctggatcctagagcccttcacttcgggttactccctctttcttgcctctatttcttagttggaagaaataaactcacaaattatggtgcagtaattttccggggaaagtaaagcctcaggaatgcccacgcctttcttccaaagcctttgtctctgagacctcttaagttctaagattaaatgcccctcgctgtttctcctctgaaaaaaaaaaaaaaaa

SEQ ID NO: 262 - protein, 415 aa, Homo sapiens
MSPEVALNRISPMLSPFISSVVRNGKVGLDATNCLRITDLKSGCTSLTPGPNCDRFKLHIPYAGETLKWDIIFNAQYPELPPDFIFGEDAEFLPDPSALQNLASWNPSNPECLLLVVKELVQQYHQFQCSRLRESSRLMFEYQTLLEEPQYGENMEIYAGKKNNWTGEFSARFLLKLPVDFSNIPTYLLKDVNEDPGEDVALLSVSFEDTEATQVYPKLYLSPRIEHALGGSSALHIPAFPGGGCLIDYVPQVCHLLTNKVQYVIQGYHKRREYIAAFLSHFGTGVVEYDAEGFTKLTLLLMWKDFCFLVHIDLPLFFPRDQPTLTFQSVYHFTNSGQLYSQAQKNYPYSPRWDGNEMAKRAKGCQGSRDACSPWEQVLAFAVAKTGCKLLQPQRNWPSSRGPPWRASEGERTAQ

SEQ ID NO: 263 - DNA, 2984 bp, Homo sapiens
gaggaggaacagaaaagaaaagaaaagaaaaagtgggaaacaaataatctaagaatgaggagaaagcaagaagagtgacccccttgtgggcactccattggttttatggcgcctctactttctggagtttgtgtaaaacaaaaatattatggtctttgtgcacatttacatcaagctcagcctgggcggcacagccagatgcgagatgcgtctctgctgatctgagtctgcctgcagcatggacctgggtcttccctgaagcatctccagggctggagggacgactgccatgcaccgagggctcatccatccacagagcagggcagtgggaggagacgccatgacccccatcctcacggtcctgatctgtctcgggctgagtctgggcccccggacccacgtgcaggcagggcacctccccaagcccaccctctgggctgaaccaggctctgtgatcacccaggggagtcctgtgaccctcaggtgtcaggggggccaggagacccaggagtaccgtctatatagagaaaagaaaacagcaccctggattacacggatcccacaggagcttgtgaagaagggccagttccccatcccatccatcacctgggaacatgcagggcggtatcgctgttactatggtagcgacactgcaggccgctcagagagcagtgaccccctggagctggtggtgacaggagcctacatcaaacccaccctctcagcccagcccagccccgtggtgaactcaggagggaatgtaaccctccagtgtgactcacaggtggcatttgatggcttcattctgtgtaaggaaggagaagatgaacacccacaatgcctgaactcccagccccatgcccgtgggtcgtcccgcgccatcttctccgtgggccccgtgagcccgagtcgcaggtggtggtacaggtgctatgcttatgactcgaactctccctatgagtggtctctacccagtgatctcctggagctcctggtcctaggtgtttctaagaagccatcactctcagtgcagccaggtcctatcgtggcccctgaggagaccctgactctgcagtgtggctctgatgctggctacaacagatttgttctgtataaggacggggaacgtgacttccttcagctcgctggcgcacagccccaggctgggctctcccaggccaacttcaccctgggccctgtgagccgctcctacgggggccagtacagatgctacggtgcacacaacctctcctccgagtggtcggcccccagcgaccccctggacatcctgatcgcaggacagttctatgacagagtctccctctcggtgcagccgggccccacggtggcctcaggagagaacgtgaccctgctgtgtcagtcacagggatggatgcaaactttccttctgaccaaggagggggcagctgatgacccatggcgtctaagatcaacgtaccaatctcaaaaataccaggctgaattccccatgggtcctgtgacctcagcccatgcggggacctacaggtgctacggctcacagagctccaaaccctacctgctgactcaccccagtgaccccctggagctcgtggtctcaggaccgtctgggggccccagctccccgacaacaggccccacctccacatctggccctgaggaccagcccctcacccccaccgggtcggatccccagagtggtctgggaaggcacctgggggttgtgatcggcatcttggtggccgtcatcctactgctcctcctcctcctcctcctcttcctcatcctccgacatcgacgtcagggcaaacactggacatcgacccagagaaaggctgatttccaacatcctgcaggggctgtggggccagagcccacagacagaggcctgcagtggaggtccagcccagctgccgatgcccaggaagaaaacctctatgctgccgtgaagcacacacagcctgaggatggggtggagatggacactcggagcccacacgatgaagacccccaggcagtgacgtatgccgaggtgaaacactccagacctaggagagaaatggcctctcctccttccccactgtctggggaattcctggacacaaaggacagacaggcggaagaggacaggcagatggacactgaggctgctgcatctgaagccccccaggatgtgacctacgcccagctgcacagcttgacccttagacggaaggcaactgagcctcctccatcccaggaagggccctctccagctgtgcccagcatctacgccactctggccatccactagcccagggggggacgcagaccccacactccatggagtctggaatgcatgggagctgcccccccagtggacaccattggaccccacccagcctggatctaccccaggagactctgggaacttttaggggtcactcaattctgcagtataaataactaatgtctctacaattttgaaataaagcaacagacttctcaataatcaatgaagtagctgagaaaactaagtcagaaagtgcattaaactgaatcacaatgtaaatattacacatcaagcgatgaaactggaaaactacaagccacgaatgaatgaattaggaaagaaaaaaagtaggaaatgaatgatcttggctttcctataagaaatttagggcagggcacggtggctcacgcctgtaattccagcactttgggaggccgaggcgggcagatcacgagttcaggagatcgagaccatcttggccaacatggtgaaaccctgtctctcctaaaaatacaaaaattagctggatgtggtggcagtgcctgtaatcccagctatttgggaggctgaggcaggagaatcgcttgaaccagggagtcagaggtttcagtgagccaagatcgcaccactgctctccagcctggcgacagagggagactccatctcaaattaaaaaaaaaaaaaaaaaagaaagaaaaaaaaaaaaaaaaaa

SEQ ID NO: 264 - protein, 650 aa, Homo sapiens
MTPILTVLICLGLSLGPRTHVQAGHLPKPTLWAEPGSVITQGSPVTLRCQGGQETQEYRLYREKKTAPWITRIPQELVKKGQFPIPSITWEHAGRYRCYYGSDTAGRSESSDPLELVVTGAYIKPTLSAQPSPVVNSGGNVTLQCDSQVAFDGFILCKEGEDEHPQCLNSQPHARGSSRAIFSVGPVSPSRRWWYRCYAYDSNSPYEWSLPSDLLELLVLGVSKKPSLSVQPGPIVAPEETLTLQCGSDAGYNRFVLYKDGERDFLQLAGAQPQAGLSQANFTLGPVSRSYGGQYRCYGAHNLSSEWSAPSDPLDILIAGQFYDRVSLSVQPGPTVASGENVTLLCQSQGWMQTFLLTKEGAADDPWRLRSTYQSQKYQAEFPMGPVTSAHAGTYRCYGSQSSKPYLLTHPSDPLELVVSGPSGGPSSPTTGPTSTSGPEDQPLTPTGSDPQSGLGRHLGVVIGILVAVILLLLLLLLLFLILRHRRQGKHWTSTQRKADFQHPAGAVGPEPTDRGLQWRSSPAADAQEENLYAAVKHTQPEDGVEMDTRSPHDEDPQAVTYAEVKHSRPRREMASPPSPLSGEFLDTKDRQAEEDRQMDTEAAASEAPQDVTYAQLHSLTLRRKATEPPPSQEGPSPAVPSIYATLAIH

SEQ ID NO: 265 - DNA, 1548 bp, Homo sapiens
caacatggcggccgcggtggcggcggcacctggggccttgggatccctgcatgctggcggcgcccgcctggtggccgcttgcagtgcgtggctctgcccggggttgaggctgcccggctcgttggcaggccggcgagcgggcccggcgatctgggcccagggctgggtacctgcggccgggggtcccgccccgaaaaggggctacagctctgagatgaagacggaggacgagctgcgggtgcggcacctggaggaggagaaccgaggaattgtggtgcttggaataaacagagcttatggcaaaaattcactcagtaaaaatcttataaaaatgctatcaaaagctgtggatgctttgaaatctgataagaaagtacggaccataataatcaggagtgaagtcccagggatattctgtgctggtgctgaccttaaggaaagagccaaaatgagttccagtgaagttggtccttttgtctccaaaataagagcagtgattaacgatattgctaatcttccagtgccaacaattgcagcaatagatggactcgctttaggtggtggtcttgaactggctttagcctgtgatatacgagtagcagcttcctctgcaaaaatgggcctggttgaaacaaaattggcgattattcctggtggaggggggacacagcgattgccacgcgccattggaatgtccctggccaaggagctcatattctctgcgcgagtcctcgatggcaaagaagccaaagcagtgggcttaatcagccacgttctggaacagaaccaggagggagacgcggcctacaggaaggccttggacctggcgagagagtttttacctcagggacctgttgcaatgagagtggcaaaattagcaattaatcaagggatggaggtcgatttagtaacagggttagccatagaagaagcttgttatgctcagaccattccaacaaaagacagacttgaaggtcttcttgcttttaaagagaaaaggccccctcgctataaaggagaataaaaggaacagaaattcttaagatgccaatgtaataaatgtacttcctggaagtgtctttcggatccactatatgcctcagcacatggaaccttaatgaccaaagtgaagagcagattattcatacggtgtaataagcgtctggaatggacccatccgtgtacttcattcaaatgtgtaaatgtcatattcattcagatttataaagctagtagtgtatagtcagaaacagaatcaaagttagatatacatttttaaatatttactgcatatgaggctttctgttaattttttaatgtgaataatttatatattgcacattctaggaataatattgattgtatgtctactgtgctgcattaagaaaataaaatttctatataccaaaaatgtgaagttataccaaataaagtttctaagtgattaatgcatacgaacagctacatatacatatatctaaacctgaaaaatgaattgatattctgagtgaaaactacctaatataaataaaattagtgaaaagaaaa

SEQ ID NO: 266 - protein, 339 aa, Homo sapiens
MAAAVAAAPGALGSLHAGGARLVAACSAWLCPGLRLPGSLAGRRAGPAIWAQGWVPAAGGPAPKRGYSSEMKTEDELRVRHLEEENRGIVVLGINRAYGKNSLSKNLIKMLSKAVDALKSDKKVRTIIIRSEVPGIFCAGADLKERAKMSSSEVGPFVSKIRAVINDIANLPVPTIAAIDGLALGGGLELALACDIRVAASSAKMGLVETKLAIIPGGGGTQRLPRAIGMSLAKELIFSARVLDGKEAKAVGLISHVLEQNQEGDAAYRKALDLAREFLPQGPVAMRVAKLAINQGMEVDLVTGLAIEEACYAQTIPTKDRLEGLLAFKEKRPPRYKGE

SEQ ID NO: 267 - DNA, 1976 bp, Homo sapiens
gccacacggtctttgagctgagtcgaggtggaccctttgaacgcagtcgccctacagccgctgattccccccgcatcgcctcccgtggaagcccaggcccgcttcgcagctttctccctttgtctcataaccatgtccaccaacgagaatgctaatacaccagctgcccgtcttcacagattcaagaacaagggaaaagacagtacagaaatgaggcgtcgcagaatagaggtcaatgtggagctgaggaaagctaagaaggatgaccagatgctgaagaggagaaatgtaagctcatttcctgatgatgctacttctccgctgcaggaaaaccgcaacaaccagggcactgtaaattggtctgttgatgacattgtcaaaggcataaatagcagcaatgtggaaaatcagctccaagctactcaagctgccaggaaactactttccagagaaaaacagccccccatagacaacataatccgggctggtttgattccgaaatttgtgtccttcttgggcagaactgattgtagtcccattcagtttgaatctgcttgggcactcactaacattgcttctgggacatcagaacaaaccaaggctgtggtagatggaggtgccatcccagcattcatttctctgttggcatctccccatgctcacatcagtgaacaagctgtctgggctctaggaaacattgcaggtgatggctcagtgttccgagacttggttattaagtacggtgcagttgacccactgttggctctccttgcagttcctgatatgtcatctttagcatgtggctacttacgtaatcttacctggacactttctaatctttgccgcaacaagaatcctgcacccccgatagatgctgttgagcagattcttcctaccttagttcggctcctgcatcatgatgatccagaagtgttagcagatacctgctgggctatttcctaccttactgatggtccaaatgaacgaattggcatggtggtgaaaacaggagttgtgccccaacttgtgaagcttctaggagcttctgaattgccaattgtgactcctgccctaagagccatagggaatattgtcactggtacagatgaacagactcaggttgtgattgatgcaggagcactcgccgtctttcccagcctgctcaccaaccccaaaactaacattcagaaggaagctacgtggacaatgtcaaacatcacagccggccgccaggaccagatacagcaagttgtgaatcatggattagtcccattccttgtcagtgttctctctaaggcagattttaagacacaaaaggaagctgtgtgggccgtgaccaactataccagtggtggaacagttgaacagattgtgtaccttgttcactgtggcataatagaaccgttgatgaacctcttaactgcaaaagataccaagattattctggttatcctggatgccatttcaaatatctttcaggctgctgagaaactaggtgaaactgagaaacttagtataatgattgaagaatgtggaggcttagacaaaattgaagctctacaaaaccatgaaaatgagtctgtgtataaggcttcgttaagcttaattgagaagtatttctctgtagaggaagaggaagatcaaaacgttgtaccagaaactacctctgaaggctacactttccaagttcaggatggggctcctgggacctttaacttttagatcatgtagctgagacataaatttgttgtgtactacgtttggtattttgtcttattgtttctctactaagaactctttcttaaatgtggtttgttactgtagcactttttacactgaaactatacttgaacagttccaactgtacatacatactgtatgaagcttgtcctctgactaggtttctaatttctatgtggaatttcctatcttgcagcatcctgtaaataaacattcaagtccacccttaaaaaaaa

SEQ ID NO: 268 - protein, 529 aa, Homo sapiens [sequence omitted]

SEQ ID NO: 269 - DNA, 1345 bp, Homo sapiens
aaaacagccggggctccagcgggagaacgataatgcaaagtgctatgttcttggctgttcaacacgactgcagacccatggacaagagcgcaggcagtggccacaagagcgaggagaagcgagaaaagatgaaacggacccttttaaaagattggaagacccgtttgagctacttcttacaaaattcctctactcctgggaagcccaaaaccggcaaaaaaagcaaacagcaagctttcatcaagccttctcctgaggaagcacagctgtggtcagaagcatttgacgagctgctagccagcaaatatggtcttgctgcattcagggcttttttaaagtcggaattctgtgaagaaaatattgaattctggctggcctgtgaagacttcaaaaaaaccaaatcaccccaaaagctgtcctcaaaagcaaggaaaatatatactgacttcatagaaaaggaagctccaaaagagataaacatagattttcaaaccaaaactctgattgcccagaatatacaagaagctacaagtggctgctttacaactgcccagaaaagggtatacagcttgatggagaacaactcttatcctcgtttcttggagtcagaattctaccaggacttgtgtaaaaagccacaaatcaccacagagcctcatgctacatgaaatgtaaaagggagcccagaaatggaggacatttcattctttttcctgaggggaaggactgtgacctgccataaagactgaccttgaattcagcctgggtgttcaggaaacatcactcagaactattgattcaaagttgggtagtgaatcaggaagccagtaactgactaggagaagctggtatcagaacagcttccctcactgtgtacagaacgcaagaagggaataggtggtctgaacgtggtgtctcactctgaaaagcaggaatgtaagatgatgaaagagacaatgtaatactgttggtccaaaagcatttaaaatcaatagatctgggattatgtggccttaggtagctggttgtacatctttccctaaatcgatccatgttaccacatagtagttttagtttaggattcagtaacagtgaagtgtttactatgtgcaagggtattgaagttcttatgaccacagatcatcagtactgttgtctcatgtaatgctaaaactgaaatggtccgtgtttgcattgttaaaaatgatgtgtgaaatagaatgagtgctatggtgttgaaaactgcagtgtccgttatgagtgccaaaaatctgtcttgaaggcagctacactttgaagtggtctttgaatacttttaataaatttattttgataaataatattg

SEQ ID NO: 270 - protein, 211 aa, Homo sapiens
MQSAMFLAVQHDCRPMDKSAGSGHKSEEKREKMKRTLLKDWKTRLSYFLQNSSTPGKPKTGKKSKQQAFIKPSPEEAQLWSEAFDELLASKYGLAAFRAFLKSEFCEENIEFWLACEDFKKTKSPQKLSSKARKIYTDFIEKEAPKEINIDFQTKTLIAQNIQEATSGCFTTAQKRVYSLMENNSYPRFLESEFYQDLCKKPQITTEPHAT

SEQ ID NO: 271 - DNA, 1940 bp, Homo sapiens
acccagggtccggcctgcgccttcccgccaggcctggacactggttcaacacctgtgacttcatgtgtgcgcgccggccacacctgcagtcacacctgtagccccctctgccaagagatccataccgaggcagcgtcggtggctacaagccctcagtccacacctgtggacacctgtgacacctggccacacgacctgtggccgcggcctggcgtctgctgcgacaggagcccttacctcccctgttataacacctgacagccacctaactgcccctgcagaaggagcaatggccttggctcctgagaggtaagagcccggcccaccctctccagatgccagtccccgagcgccctgcagccggccctgactctccgcggccgggcacccgcagggcagccccacgcgtgctgttcggagagtggctccttggagagatcagcagcggctgctatgaggggctgcagtggctggacgaggcccgcacctgtttccgcgtgccctggaagcacttcgcgcgcaaggacctgagcgaggccgacgcgcgcatcttcaaggcctgggctgtggcccgcggcaggtggccgcctagcagcaggggaggtggcccgccccccgaggctgagactgcggagcgcgccggctggaaaaccaacttccgctgcgcactgcgcagcacgcgtcgcttcgtgatgctgcgagataactcgggggacccggccgacccgcacaaggtgtacgcgctcagccgggagctgtgctggcgagaaggcccaggcacggaccagactgaggcagaggcccccgcagctgtcccaccaccacagggtgggcccccagggccattcctggcacacacacatgctggactccaagccccaggccccctccctgccccagctggtgacgagggggacctcctgctccaggcagtgcaacagagctgcctggcagaccatctgctgacagcgtcatggggggcagatccagtcccaaccaaggctcctggagagggacaagaagggcttcccctgactggggcctgtgctggaggcccagggctccctgctggggagctgtacgggtgggcagtagagacgacccccagccccgggccccagcccgcggcactaacgacaggcgaggccgcggccccagagtccccgcaccaggcagagccgtacctgtcaccctccccaagcgcctgcaccgcggtgcaagagcccagcccaggggcgctggacgtgaccatcatgtacaagggccgcacggtgctgcagaaggtggtgggacacccgagctgcacgttcctatacggccccccagacccagctgtccgggccacagacccccagcaggtagcattccccagccctgccgagctcccggaccagaagcagctgcgctacacggaggaactgctgcggcacgtggcccctgggttgcacctggagcttcgggggccacagctgtgggcccggcgcatgggcaagtgcaaggtgtactgggaggtgggcggccccccaggctccgccagcccctccaccccagcctgcctgctgcctcggaactgtgacacccccatcttcgacttcagagtcttcttccgagagctggtggaattccgggcacggcagcgccgtggctccccacgctataccatctacctgggcttcgggcaggacctgtcagctgggaggcccaaggagaagagcctggtcctggtgaagctggaaccctggctgtgccgagtgcacctagagggcacgcagcgtgagggtgtgtcttccctggatagcagcagcctcagcctctgcctgtccagcgccaacagcctctatgacgacatcgagtgcttccttatggagctggagcagcccgcctagaacccagtctaatgagaactccagaaagctggagcagcccacctagagctggcc

SEQ ID NO: 272 - protein, 516 aa, Homo sapiens
MPVPERPAAGPDSPRPGTRRAAPRVLFGEWLLGEISSGCYEGLQWLDEARTCFRVPWKHFARKDLSEADARIFKAWAVARGRWPPSSRGGGPPPEAETAERAGWKTNFRCALRSTRRFVMLRDNSGDPADPHKVYALSRELCWREGPGTDQTEAEAPAAVPPPQGGPPGPFLAHTHAGLQAPGPLPAPAGDEGDLLLQAVQQSCLADHLLTASWGADPVPTKAPGEGQEGLPLTGACAGGPGLPAGELYGWAVETTPSPGPQPAALTTGEAAAPESPHQAEPYLSPSPSACTAVQEPSPGALDVTIMYKGRTVLQKVVGHPSCTFLYGPPDPAVRATDPQQVAFPSPAELPDQKQLRYTEELLRHVAPGLHLELRGPQLWARRMGKCKVYWEVGGPPGSASPSTPACLLPRNCDTPIFDFRVFFRELVEFRARQRRGSPRYTIYLGFGQDLSAGRPKEKSLVLVKLEPWLCRVHLEGTQREGVSSLDSSSLSLCLSSANSLYDDIECFLMELEQPA

SEQ ID NO: 273 - DNA, 3246 bp, Homo sapiens
  Unsure 2530: Unknown base
agtgtggttttagtttttcctaagaagtggcgtggtttggggctttatatccgggaggagcatatgtacgcaaatcctggggcgtttgcaaacccggatccggggcgtctggccccatgcccggccgggcgtttgagggctactgccacgcagcgtttctggagcctgccggctggtgccctggtggcctttatctctgtccccctttgtcctctttatctcaggctctccaggaggccggggggcccactccgcctatcgctcccctcggctacgctgccactccaatgccccgcaggtcgcgagctgctgttctttcgaaggcgccggagaaccaggggcgtcccgcgccacctctgactcggagcagcgccgagcactgacgctcccgcccttgggcaaggacgccagtgcgcccgcgcgcgtccctctgcgcggcagcccgtcgcgggccctcaaggggaagcccaggccaggatggccccgggtcgcgcggtggccgggctcctgttgctggcggccgccggcctcggaggagtggcggaggggccagggctagccttcagcgaggatgtgctgagcgtgttcggcgcgaatctgagcctgtcggcggcgcagctccagcacttgctggagcagatgggagccgcctcccgcgtgggcgtcccggagcctggccagctgcacttcaaccagtgtttaactgctgaagagatcttttcccttcatggcttttcaaatgctacccaaataaccagctccaaattctctgtcatctgtccagcagtcttacagcaattgaactttcacccatgtgaggatcggcccaagcacaaaacaagaccaagtcattcagaagtttggggatatggattcctgtcagtgacgattattaatctggcatctctcctcggattgattttgactccactgataaagaaatcttatttcccaaagattttgaccttttttgtggggctggctattgggactcttttttcaaatgcaattttccaacttattccagaggcatttggatttgatcccaaagtcgacagttatgttgagaaggcagttgctgtgtttggtggattttacctacttttcttttttgaaagaatgctaaagatgttattaaagacatatggtcagaatggtcatacccactttggaaatgataactttggtcctcaagaaaaaactcatcaacctaaagcattacctgccatcaatggtgtgacatgctatgcaaatcctgctgtcacagaagctaatggacatatccattttgataatgtcagtgtggtatctctacaggatggaaaaaaagagccaagttcatgtacctgtttgaaggggcccaaactgtcagaaatagggacgattgcctggatgataacgctctgcgatgccctccacaatttcatcgatggcctggcgattggggcttcctgcaccttgtctctccttcagggactcagtacttccatagcaatcctatgtgaggagtttccccacgagttaggagactttgtgatcctactcaatgcagggatgagcactcgacaagccttgctattcaacttcctttctgcatgttcctgctatgttgggctagcttttggcattttggtgggcaacaatttcgctccaaatattatatttgcacttgctggaggcatgttcctctatatttctctggcagatatgtttccagagatgaatgatatgctgagagaaaaggtaactggaagaaaaaccgatttcaccttcttcatgattcagaatgctggaatgttaactggattcacagccattctactcattaccttgtatgcaggagaaatcgaattggagtaatagaaaatggaagatggtgttgttaataaaggcatttaatagataaaaacatctccaaaaaggattttgaagctgatcctatttagttaaaaagataattttgctttcaactgtaggtccagaaaactaattattggcatcagtctgtgaaatagtccattatttgttgttaaaaatgcttcaaaaggttttcagtgtcagtctgagatgcctggtatataggagcctttgggaaatacttatttttcagtattccatgcatattagatatcaccatgaagcaagagacatgcattctataatcatgtagacactcagactcaggggaaaatacaagttatatcctgaaagcctttaaaactctatggtaggatcaaagattcaaatggtttcagagaggttttatttcaattaatttgttctagtgctttcaagagcaagtacatcaaaatgtagaaggtaaaatgtatgcaacactaatataaattattccaagtctttaaggagccaaagaaaaaaaagatttctcacagctttttgttctgttttgtatttcaattaggaacttgcagtattattttgaaaaccattctaaaataataggagttaggaaataaataaagttttgctagccctgctaagttcaggcttagaggcttatcgctaagtntaaacttcaccagattccacgaaaagctggatagctttttttctgacttatgttgtggttgcacccctcacaaatggcagaacagtatgtaaagctggtaacacctcggtttcagtgcaccatgtgtttgctttgtgaaggtgaagaatatgttggtttagagaaagaaattggatgtaattttatgcaatttacttttaaagacaaacataactatttagcagagaatattttaataaatgcaaaacaacagctggactgctgtacatcaaggacagattaactggaaaacatatgttccttatgtgtgattgagagccattcagaaaagacttcctttgtgttcagcctatacttttccatatggtataccttgaaaaaaattagcacaccatggttatttttctaccttttataaaagacagagcctgtttactcatttagaagatagagaaaattggtctaaaattgaacatcctagattcacactcccaagtcacttaaggtgatttgatggtgaggaaaatgattgacaaagcccaacaatgatctcaggaattacattttccaacagaccaaaaaatgttttcatgtagcagcaatgcagatttggtgaatatttaatatatattttagtatgtatttcactttatgactgacaattaaaaaatattgtttggccaaatagtaaacacccttttgaaaccatgaaaaaa

SEQ ID NO: 274 - protein, 460 aa, Homo sapiens
MAPGRAVAGLLLLAAAGLGGVAEGPGLAFSEDVLSVFGANLSLSAAQLQHLLEQMGAASRVGVPEPGQLHFNQCLTAEEIFSLHGFSNATQITSSKFSVICPAVLQQLNFHPCEDRPKHKTRPSHSEVWGYGFLSVTIINLASLLGLILTPLIKKSYFPKILTFFVGLAIGTLFSNAIFQLIPEAFGFDPKVDSYVEKAVAVFGGFYLLFFFERMLKMLLKTYGQNGHTHFGNDNFGPQEKTHQPKALPAINGVTCYANPAVTEANGHIHFDNVSVVSLQDGKKEPSSCTCLKGPKLSEIGTIAWMITLCDALHNFIDGLAIGASCTLSLLQGLSTSIAILCEEFPHELGDFVILLNAGMSTRQALLFNFLSACSCYVGLAFGILVGNNFAPNIIFALAGGMFLYISLADMFPEMNDMLREKVTGRKTDFTFFMIQNAGMLTGFTAILLITLYAGEIELE

SEQ ID NO: 275 - DNA, 3173 bp, Homo sapiens
tgatgtgatatggctgcaagtgcctttgacccttttgtctcccttccataaactgaaatacctaagctgctccaacctcctttttgtcttttgtttcataaatcctttcccattgcacatcaactcctgtctctctttgtactgtcactctcatctgttgctttccattcacactgcctttagccactcatcattttgtgcctacaccacagaaacctctgaatgtaatggatgttcctaccagaggacaagtcgtacaatggtggaggaataggttcttcaaataggatcatggacttcttggaggagccaatccctggtgtagggacctatgatgatttcaatacaattgattgggtgagagagaagtctcgagaccgggataggcaccgagagattaccaataaaagcaaagagtcaacatgggccttaattcacagtgtgagtgatgctttttccggctggttgttgatgctccttattgggcttttatcaggttcgttagctggtttgatagacatctctgctcattggatgacagacttaaaagaaggtatatgcacagggggattctggtttaaccatgaacattgttgctggaactctgagcatgtcacctttgaagagagagacaaatgtccagagtggaatagttggtcccagcttatcatcagcacagatgagggagcctttgcctacatagtcaattatttcatgtacgtcctctgggctctcctatttgccttccttgccgtatctcttgtcaaggtgtttgcgccttatgcctgtggctctggaatccctgagataaaaactatcttgagtggtttcattattaggggctatttgggtaagtggactctggttatcaaaaccatcaccttggtgctggcagtgtcgtctggcttgagcctgggcaaagagggccctctagtgcacgtggcttgctgctgtgggaacatcctgtgccactgcttcaacaaatacaggaagaatgaagccaagcgcagagaggtcttgtcggctgcagcagcagctggtgtatctgtagcctttggagcacctataggtggagtattattcagccttgaagaggtcagctactattttcccctcaaaacattgtggcgttcattctttgctgccttggtggcagcattcactctacgctccatcaatccatttgggaacagccgcctggtactattttatgtggagtttcacaccccatggcatctctttgagctcgtgccattcattctgctgggcatatttggtggtctgtggggagcactgtttatccgcacaaacattgcctggtgtcggaagcgaaagaccacccagttgggcaagtatcctgttatagaggtactcgtcgtgacagccatcactgccatcctggctttccccaatgaatacactcggatgagcacaagtgagctcatttctgagctgtttaatgactgtggccttctggactcctccaagctctgtgattatgagaaccgtttcaacacaagcaaagggggtgaactgcctgacagaccggctggcgtgggagtctacagtgcaatgtggcagctggctttaacactcatactgaaaattgtcattactatattcacctttggcatgaagatcccttctggcctctttatccctagcatggctgttggtgctatagcaggtcgacttctaggagtaggaatggaacagctggcttattaccaccaggaatggaccgtcttcaatagctggtgtagtcagggagctgattgcatcacccccggcctttatgcaatggttggggctgcagcctgcttaggtggggtgactcggatgactgtttctcttgttgtcataatgtttgaactgactggtggcttagaatacatcgtgcctctgatggctgcagccatgacaagcaagtgggtggcagatgctcttgggcgggagggcatctatgatgcccacatccgtctcaatggatacccctttcttgaagccaaagaagagtttgctcataagaccctggcaatggatgtgatgaaaccccggagaaatgatcctttgttgactgtccttactcaggacagtatgactgtggaagatgtagagaccataatcagtgaaaccacttacagtggcttcccagtggtggtatcccgggagtcccaaagacttgtgggctttgtcctccgaagagatctcattatttcaattgaaaatgctcgaaagaaacaggatggggttgttagcacttccatcatttatttcacggagcattctcctccattgccaccatacactccacccactctaaagcttcggaacatcctcgatctcagccccttcactgtgactgaccttacacccatggagatcgtagtggatattttccgaaagctgggactgcggcagtgcctggttacacacaacgggcgattgcttggaatcattaccaaaaaggatgtgttaaagcatatagcacagatggcgaaccaagatcctgattccattctcttcaactagaatcatagagttctggatgtaaagcgggaaggacattacagaccatggatatgttgtttaacggtacccaaaacacattttccatatttggatggtgaagtcacattagtgtgttgtctctttcctacaagttaaccagttgcactacataatctctggaaattaattttctctttaggagaaattatagttaggcttccatgatgttacattaggaagatatcatgaaagaataaataagattgctatggtttaattatatttgctttttaaaagatttttttaacttaaaaagtagttagccaatatgcaatcactgaaaactatgcaagagaaattccaaccgtcctgacctataacctgtaggaaaccgacgaaaaagtcactcttttgggatctaactgttgttactggaagacgaaggtaaactaaggggctttgcttttcaaaccagagaaaggaaagccagaaggaaaagagtaatggtattttctagactgtgaagattcagttcaaatgttatccttgttcctgttacaatatttagcattattagtttgttatgtgtgtatgtttatgttaattttaatttctgattataagacaatgctgctttggttaatctcttctaaaggaattta

SEQ ID NO: 276 - protein, 746 aa, Homo sapiens
MDFLEEPIPGVGTYDDFNTIDWVREKSRDRDRHREITNKSKESTWALIHSVSDAFSGWLLMLLIGLLSGSLAGLIDISAHWMTDLKEGICTGGFWFNHEHCCWNSEHVTFEERDKCPEWNSWSQLIISTDEGAFAYIVNYFMYVLWALLFAFLAVSLVKVFAPYACGSGIPEIKTILSGFIIRGYLGKWTLVIKTITLVLAVSSGLSLGKEGPLVHVACCCGNILCHCFNKYRKNEAKRREVLSAAAAAGVSVAFGAPIGGVLFSLEEVSYYFPLKTLWRSFFAALVAAFTLRSINPFGNSRLVLFYVEFHTPWHLFELVPFILLGIFGGLWGALFIRTNIAWCRKRKTTQLGKYPVIEVLVVTAITAILAFPNEYTRMSTSELISELFNDCGLLDSSKLCDYENRFNTSKGGELPDRPAGVGVYSAMWQLALTLILKIVITIFTFGMKIPSGLFIPSMAVGAIAGRLLGVGMEQLAYYHQEWTVFNSWCSQGADCITPGLYAMVGAAACLGGVTRMTVSLVVIMFELTGGLEYIVPLMAAAMTSKWVADALGREGIYDAHIRLNGYPFLEAKEEFAHKTLAMDVMKPRRNDPLLTVLTQDSMTVEDVETIISETTYSGFPVVVSRESQRLVGFVLRRDLIISIENARKKQDGVVSTSIIYFTEHSPPLPPYTPPTLKLRNILDLSPFTVTDLTPMEIVVDIFRKLGLRQCLVTHNGRLLGIITKKDVLKHIAQMANQDPDSILFN

SEQ ID NO: 277 - DNA, 2092 bp, Homo sapiens
ccacgcgtccggtgcggacgggcgcggaccacctccaggggctaagtgatggatcttgtactccgtgttgcagattactatttttttacaccatacgtgtatccagccacatggccagaagatgacatcttccgacaagctattagtcttctgattgtaacaaatgttggtgcttacatcctttatttcttctgtgcaacactgagctattattttgtcttcgatcatgcattaatgaaacatccacaatttttaaagaatcaagtccgtcgagagattaagtttactgtccaggcattgccatggataagtattcttactgttgcactgttcttgctggagataagaggttacagcaaattacatgatgacctaggagagtttccatatggattgtttgaacttgtcgttagtataatatctttcctctttttcactgacatgttcatctactggattcacagaggccttcatcatagactggtatataagcgcctacataaacctcaccatatttggaagattcctactccatttgcaagtcatgcttttcaccctattgatggctttcttcagagtctaccttaccatatatacccttttatctttccattacacaaggtggtttatttaagtctgtacatcttggttaatatctggacaatttccattcatgacggtgattttcgtgtcccccaaatcttacagccatttattaatggctcagctcatcatacagaccaccatatgttctttgactataattatggacaatatttcactttgtgggataggattggcggctcattcaaaaatccttcatcctttgaggggaagggaccgctcagttatgtgaaggagatgacagagggaaagcgcagcagcccttcaggaaatggctgtaagaatgaaaaattattcaatggagagtttacaaagactgaatagattattgcccagttattcttaagtaaggacaaagaaggaaatatcatcgtatttcttttttttaataaggaaaaaataatctccatacagtcaagatacatagtaaatggtatcatttggaaatcagcatcgtgggcactgctgaggaatgatcctagtggtaggtcagaagaagatgctgtgaacaccaggactttaatcttatgcttaaaatgccagatgttgttcgggccccaacttgtatttctagcagcagatctgtagtttgtatagcctcaacaacaattttaaataagatggagaataaattattgaggggactaggctatatgcatttgccttcatccacccatgtttattaagaatcattgtgcttaataataccaagactaagcaccataaccaagaaatactaatgtaaagattgtttcttgtttcaggaatggttaattcttcaacgttggtatgataatgataacttgttttgacttgaataaagtactacatcagtgtggaaaaaaattctgatacattagcagctatgtaaatgacctaattgatagcaggtgtaataagactatcgtcttcctacacataggaggctcattctctggacacactatcacctattacattttactgattaacaaataaattggaatttaaaaatatcgatatcaccatgatttaatccagatctgggattatgtagctaaacattgtgatgattattatttaaaaccattatttaataagagtaaaaatatgtgaatctggatatatttaaaaaaagaaatttgattgcccagataatatattaggcactactgattttttagttaaattgatgcactacacttttgatgtttgaagttacaacctgtaatttttttgtaaaggaaataattgccaaatacctaggcccattgctgacgattagttctaaaatcttattcctcctcttctcccctcacttttccctacttcctctgcaaaaagatttaacaaatacattcataaggaaatgtgtgttgtaacaaatatattgcaaaaacatagtttgtaaaggcattctataagctatttatgtaaaatcaataaaagttgatcataattaaactgtaaaaaaaaaaaaaaaggcggc

SEQ ID NO: 278 - protein, 299 aa, Homo sapiens
MDLVLRVADYYFFTPYVYPATWPEDDIFRQAISLLIVTNVGAYILYFFCATLSYYFVFDHALMKHPQFLKNQVRREIKFTVQALPWISILTVALFLLEIRGYSKLHDDLGEFPYGLFELVVSIISFLFFTDMFIYWIHRGLHHRLVYKRLHKPHHIWKIPTPFASHAFHPIDGFLQSLPYHIYPFIFPLHKVVYLSLYILVNIWTISIHDGDFRVPQILQPFINGSAHHTDHHMFFDYNYGQYFTLWDRIGGSFKNPSSFEGKGPLSYVKEMTEGKRSSPSGNGCKNEKLFNGEFTKTE

SEQ ID NO: 279 - DNA, 1014 bp, Homo sapiens
atggatgaaacaggaaatctgacagtatcttctgccacatgccatgacactattgatgacttccgcaatcaagtgtattccaccttgtactctatgatctctgttgtaggcttctttggcaatggctttgtgctctatgtcctcataaaaacctatcacaagaagtcagccttccaagtatacatgattaatttagcagtagcagatctactttgtgtgtgcacactgcctctccgtgtggtctattatgttcacaaaggcatttggctctttggtgacttcttgtgccgcctcagcacctatgctttgtatgtcaacctctattgtagcatcttctttatgacagccatgagctttttccggtgcattgcaattgtttttccagtccagaacattaatttggttacacagaaaaaagccaggtttgtgtgtgtaggtatttggatttttgtgattttgaccagttctccatttctaatggccaaaccacaaaaagatgagaaaaataataccaagtgctttgagcccccacaagacaatcaaactaaaaatcatgttttggtcttgcattatgtgtcattgtttgttggctttatcatcccttttgttattataattgtctgttacacaatgatcattttgaccttactaaaaaaatcaatgaaaaaaaatctgtcaagtcataaaaaggctataggaatgatcatggtcgtgaccgctgcctttttagtcagtttcatgccatatcatattcaacgtaccattcaccttcattttttacacaatgaaactaaaccctgtgattctgtccttagaatgcagaagtccgtggtcataaccttgtctctggctgcatccaattgttgctttgaccctctcctatatttcttttctgggggtaactttaggaaaaggctgtctacattcagaaagcattctttgtccagcgtgacttatgtacccagaaagaaggcctctttgccagaaaaaggagaagaaatatgtaaagtatag

SEQ ID NO: 280 - protein, 337 aa, Homo sapiens
MDETGNLTVSSATCHDTIDDFRNQVYSTLYSMISVVGFFGNGFVLYVLIKTYHKKSAFQVYMINLAVADLLCVCTLPLRVVYYVHKGIWLFGDFLCRLSTYALYVNLYCSIFFMTAMSFFRCIAIVFPVQNINLVTQKKARFVCVGIWIFVILTSSPFLMAKPQKDEKNNTKCFEPPQDNQTKNHVLVLHYVSLFVGFIIPFVIIIVCYTMIILTLLKKSMKKNLSSHKKAIGMIMVVTAAFLVSFMPYHIQRTIHLHFLHNETKPCDSVLRMQKSVVITLSLAASNCCFDPLLYFFSGGNFRKRLSTFRKHSLSSVTYVPRKKASLPEKGEEICKV

SEQ ID NO: 281 - DNA, 1784 bp, Homo sapiens
ggcttaccacagcctcaacttctcaggctccagccatcctctcacctcagcctcccaagtagctaggactacaggcgtgtgccactgtgcctggcctaattttataattttaaatgtctgtaaagtaagcaaaatgactagttgaattgtacattaaatatatctaatccctaagagtttataatggaaagggatcaaaactttttcaattgcgataaaactcacataacaaaattaaccattttaaagtgaacaatttagtggtatttagtgcattcacagtgtcgtgcagccaacacctgtatctagttccaagacattttcatctccccaaaaggagaccccatacacgtgaagcagtccctctcccatccccctcctcccatccgctagcaactgctaatttgctttttgtctctatggatttacctgttctggatatttcacataaatggaattatacaataaaggaccgtttgtttctaacttctttcactaagcatccatgttatagcatatatcagacttcattcctttatgactgaataatactttgctgaatggatatatcagtgttttatttgtcctttcatcagttggtggacatttgggttctttctaccttttggctattgtgactagtggtgttgcaaacattcatgtacaagtttttgtttgaatgcctgttgtcagttcttctagatttatacttagaagtggaattgctgggtcatatggtaatttctctgtttcaactttttgagagaccacgaaaccgttttccacagtggtggcaccatttgacatgcccactagaaatatatgagagttccattttcttcacatcttctgacagctttttggggtgttgggatgattcgtctaattgggaaaataagtaccttatttgggcctatatggtatttttaattctgtgtgtctgctcccaaactctgtagccctgccctcccttatattgtgtatcctgtttcagattgtttccgtttcttctgagacactgcatatacccctacatgtatctgtgctaggcatacatccctgtaacttcatggcatttttgtaattgctgtgtacctgttacgtatactgagtgggagtgtctcatttgctgtagaactctctgcattagtgtagtgtctggcacacagtagctgctcaggcattttttaagtatatgattattgggaaaactacagagctagggagagatctgaagaaatactagaaatttttttctgcaaagaaaactttagaaaattgttgacatcatctgtggcatgcagcaaaagttgatgtaaaaggaacagaaagacctatggagataatgggatgtaataacagaaaacatacagaaacaattggttctgaaatcagttaagagcagaactggaattcatactctgtggaatgaatcagcaatgtggaaggagtaacaagattttttaaaaagattttgaatttaggctgggtgcagtggctcacgcctgtaaccccatcactttgggaggccagagtaggtggattgcttcaacccaggcattcgagactagcctggacagcatggcaaaaccctatctctacaaaaaataaaaaattagccaggtgtggtggcatgcgcctgtagtcccatctacttgggaggctgaggtggatggatcacctgagcctgggaagtggaggttgcagtaggctgaagtcatgccactgcactcaaacctggcggacagagtgagaccctatctcaaaaaaaaaaaaaaaaaaaa

SEQ ID NO: 282 - protein, 99 aa, Homo sapiens [sequence omitted]

SEQ ID NO: 283 - DNA, 1922 bp, Homo sapiens
gcccctttctttctcctcgtcggcccgagagcaggaacacgataacgaaggaggcccaacttcattcaataaggagcctgacggatttatcccagacggtagaacaaaaggaagaatattgatggattttaaaccagagtttttaaagagcttgagaatacggggaaattaatttgttctcctacacacatagatagggtaaggttgtttctgatgcagctgagaaaaatgcagaccgtcaaaaaggagcaggcgtctcttgatgccagtagcaatgtggacaagatgatggtccttaattctgctttaacggaagtgtcagaagactccacaacaggtgaggacgtgcttctcagtgaaggaagtgtggggaagaacaaatcttctgcatgtcggaggaaacgggaattcattcctgatgaaaagaaagatgctatgtattgggaaaaaaggcggaaaaataatgaagctgccaaaagatctcgtgagaagcgtcgactgaatgacctggttttagagaacaaactaattgcactgggagaagaaaacgccactttaaaagctgagctgctttcactaaaattaaagtttggtttaattagctccacagcatatgctcaagagattcagaaactcagtaattctacagctgtgtactttcaagattaccagacttccaaatccaatgtgagttcatttgtggacgagcacgaaccctcgatggtgtcaagtagttgtatttctgtcattaaacactctccacaaagctcgctgtccgatgtttcagaagtgtcctcagtagaacacacgcaggagagctctgtgcagggaagctgcagaagtcctgaaaacaagttccagattatcaagcaagagccgatggaattagagagctacacaagggagccaagagatgaccgaggctcttacacagcgtccatctatcaaaactatatggggaattctttctctgggtactcacactctcccccactactgcaagtcaaccgatcctccagcaactccccgggaacgtcggaaactgatgatggtgtggtaggaaagtcatctgatggagaagacgagcaacaggtccccaagggccccatccattctccagttgaactcaagcatgtgcatgcaactgtggttaaagttccagaagtgaattcctctgccttgccacacaagctccggatcaaagccaaagccatgcagatcaaagtagaagcctttgataatgaatttgaggccacgcaaaaactttcctcacctattgacatgacatctaaaagacatttcgaactcgaaaagcatagtgccccaagtatggtacattcttctcttactcctttctcagtgcaagtgactaacattcaagattggtctctcaaatcggagcactggcatcaaaaagaactgagtggcaaaactcagaatagtttcaaaactggagttgttgaaatgaaagacagtggctacaaagtttctgacccagagaacttgtatttgaagcaggggatagcaaacttatctgcagaggttgtctcactcaagagacttatagccacacaaccaatctctgcttcagactctgggtaaattactactgagtaagagctgggcatttagaaagatgtcatttgcaatagagcagtccattttgtattatgctgaattttcactggacctgtgatgtcatttcactgtgatgtgcacatgttgtctgtttggtgtctttttgtgcacagattatgatgaagattagattgtgttatcactctgcctgtgtatagtcagatagtccatgcgaaggctgtatatattgaacattatttttgttgttctattataaagtgtgtaagttaccagtttcaataaaggattggtgacaaacacagaaaaaaaaaaaaaaaaaaaaa

SEQ ID NO: 284 - protein, 462 aa, Homo sapiens
MQLRKMQTVKKEQASLDASSNVDKMMVLNSALTEVSEDSTTGEDVLLSEGSVGKNKSSACRRKREFIPDEKKDAMYWEKRRKNNEAAKRSREKRRLNDLVLENKLIALGEENATLKAELLSLKLKFGLISSTAYAQEIQKLSNSTAVYFQDYQTSKSNVSSFVDEHEPSMVSSSCISVIKHSPQSSLSDVSEVSSVEHTQESSVQGSCRSPENKFQIIKQEPMELESYTREPRDDRGSYTASIYQNYMGNSFSGYSHSPPLLQVNRSSSNSPGTSETDDGVVGKSSDGEDEQQVPKGPIHSPVELKHVHATVVKVPEVNSSALPHKLRIKAKAMQIKVEAFDNEFEATQKLSSPIDMTSKRHFELEKHSAPSMVHSSLTPFSVQVTNIQDWSLKSEHWHQKELSGKTQNSFKTGVVEMKDSGYKVSDPENLYLKQGIANLSAEVVSLKRLIATQPISASDSG

SEQ ID NO: 285 - DNA, 3496 bp, Homo sapiens
ctgggccgggggctggagagtgaccgtggtctgagtgacctggggcggctgcgtgggccggggtgggcctcaaagccgggcaccagacgggaggggcggcgctcgggccgcgcgctgcccgcgccgggtcctggcgggcggcgaggctggggctgactcctgcctcaggatgccgggggaggaagaggagcgggccttcctggtggcccgcgaggagctggcgagcgccctgaggagggattccgggcaggcgttttccctggagcagctccggccgctactagccagctctctgccgctagccgcccgctacctgcagctggacgccgcacgccttgtccgctgcaacgctcatggggagccccgaaactacctcaacaccctgtccacggctctgaacatcctggagaaatacggccgcaaccttctcagccctcagcggcctcggtactggcgtggtgtcaagtttaataaccctgtctttcgcagcacggtggatgctgtgcaggggggccgagatgtgctgcgattatatggctacacagaggagcaaccagatgggttgagcttccccgaagggcaggaggagccagatgagcaccaggttgctacagtcacactggaagtactgctgcttcggacagagctcagcctgctattgcagaatactcatccaagacagcaggcactggagcagctgttggaagacaaggttgaagatgatatgctgcagctttcagaatttgaccccctattgagagagattgctcctggccccctcaccacaccctctgtcccaggctccactcctggtccctgcttcctctgtggttctgccccaggcacactgcactgcccatcctgtaaacaggccctgtgtccagcctgtgaccacctgttccatggacacccatcccgtgctcatcacctccgccagaccctgcctggggtcctgcagggtacccacctgagccccagtttacctgcctcagcccaaccacggccccagtcgacctccctgctggccctgggagacagctctctttcttcccctaatcctgcaagtgctcatttgccctggcactgtgctgcctgtgccatgctaaatgagccttgggcagtgctctgtgtggcctgtgatcggccccgaggctgtaaggggttggggttgggaactgagggtccccaaggaactggaggcctagaacctgatcttgcacggggtcggtgggcctgccagagctgtacctttgagaatgaggcagctgctgtgctatgttccatatgtgagcgacctcggctggcccagcctcccagcttggtggtggattcccgagatgctggcatttgcctgcaaccccttcagcagggggatgctttgctggcctctgcccagagtcaagtctggtactgtattcactgtaccttctgcaactcgagccctggctgggtgtgtgttatgtgcaaccggactagtagccccattccagcacaacatgccccccggccctatgccagctctttggaaaagggaccccccaagcctgggcccccacgacgccttagtgcccccctgcccagttcctgtggagatcctgagaagcagcgccaagacaagatgcgggaagaaggcctccagctagtgagcatgatccgggaaggggaagccgcaggtgcctgtccagaggagatcttctcggctctgcagtactcgggcactgaggtgcctctgcagtggttgcgctcagaactgccctacgtcctggagatggtggctgagctggctggacagcaggaccctgggctgggtgccttttcctgtcaggaggcccggagagcctggctggatcgtcatggcaaccttgatgaagctgtggaggagtgtgtgaggaccaggcgaaggaaggtgcaggagctccagtctctaggctttgggcctgaggaggggtctctccaggcattgttccagcacggaggtgatgtgtcacgggccctgactgagctacagcgccaacgcctagagcccttccgccagcgcctctgggacagtggccctgagcccaccccttcctgggatgggccagacaagcagagcctggtcaggcggcttttggcagtctacgcactccccagctggggccgggcagagctggcactgtcactgctgcaggagacacccaggaactatgagttgggggatgtggtagaagctgtgaggcacagccaggaccgggccttcctgcgccgcttgcttgcccaggagtgtgccgtgtgtggctgggccctgccccacaaccggatgcaggccctgacttcctgtgagtgcaccatctgtcctgactgcttccgccagcacttcaccatcgccttgaaggagaagcacatcacagacatggtgtgccctgcctgtggccgccccgacctcaccgatgacacacagttgctcagctacttctctacccttgacatccagcttcgcgagagcctagagccagatgcctatgcgttgttccataagaagctgaccgagggtgtgctgatgcgggaccccaagttcttgtggtgtgcccagtgctcctttggcttcatatatgagcgtgagcagctggaggcaacttgtccccagtgtcaccagaccttctgtgtgcgctgcaagcgccagtgggaggagcagcaccgaggtcggagctgtgaggacttccagaactggaaacgcatgaacgacccagaataccaggcccagggcctagcaatgtatcttcaggaaaacggcattgactgccccaaatgcaagttctcgtacgccctggcccgaggaggctgcatgcactttcactgtacccagtgccgccaccagttctgcagcggctgctacaatgccttttacgccaagaataaatgtccagagcctaactgcagggtgaaaaagtccctgcacggccaccaccctcgagactgcctcttctacctgcgggactggactgctctccggcttcagaagctgctacaggacaataacgtcatgtttaatacagagcctccagctggggcccgggcagtccctggaggcggctgccgagtgatagagcagaaggaggttcccaatgggctcagggacgaagcttgtggcaaggaaactccagctggctatgccggcctgtgccaggcacactacaaagagtatcttgtgagcctcatcaatgcccactcgctggacccagccaccttgtatgaggtggaagagctggagacggccactgagcgctacctgcacgtacgcccccagcctttggctggagaggatccccctgcttaccaggcccgcttgttacagaagctgacagaagaggtacccttgggacagagtatcccccgcaggcggaagtagctgagggcaagggtcccgatgagggtcccatggcctgctccctcaggaacagctccagcaccaataaagaggcatcttaccaccaaaaaaaaaaaaaaaaaaaaaaaa

SEQ ID NO: 286 - protein, 1072 aa, Homo sapiens
MPGEEEERAFLVAREELASALRRDSGQAFSLEQLRPLLASSLPLAARYLQLDAARLVRCNAHGEPRNYLNTLSTALNILEKYGRNLLSPQRPRYWRGVKFNNPVFRSTVDAVQGGRDVLRLYGYTEEQPDGLSFPEGQEEPDEHQVATVTLEVLLLRTELSLLLQNTHPRQQALEQLLEDKVEDDMLQLSEFDPLLREIAPGPLTTPSVPGSTPGPCFLCGSAPGTLHCPSCKQALCPACDHLFHGHPSRAHHLRQTLPGVLQGTHLSPSLPASAQPRPQSTSLLALGDSSLSSPNPASAHLPWHCAACAMLNEPWAVLCVACDRPRGCKGLGLGTEGPQGTGGLEPDLARGRWACQSCTFENEAAAVLCSICERPRLAQPPSLVVDSRDAGICLQPLQQGDALLASAQSQVWYCIHCTFCNSSPGWVCVMCNRTSSPIPAQHAPRPYASSLEKGPPKPGPPRRLSAPLPSSCGDPEKQRQDKMREEGLQLVSMIREGEAAGACPEEIFSALQYSGTEVPLQWLRSELPYVLEMVAELAGQQDPGLGAFSCQEARRAWLDRHGNLDEAVEECVRTRRRKVQELQSLGFGPEEGSLQALFQHGGDVSRALTELQRQRLEPFRQRLWDSGPEPTPSWDGPDKQSLVRRLLAVYALPSWGRAELALSLLQETPRNYELGDVVEAVRHSQDRAFLRRLLAQECAVCGWALPHNRMQALTSCECTICPDCFRQHFTIALKEKHITDMVCPACGRPDLTDDTQLLSYFSTLDIQLRESLEPDAYALFHKKLTEGVLMRDPKFLWCAQCSFGFIYEREQLEATCPQCHQTFCVRCKRQWEEQHRGRSCEDFQNWKRMNDPEYQAQGLAMYLQENGIDCPKCKFSYALARGGCMHFHCTQCRHQFCSGCYNAFYAKNKCPEPNCRVKKSLHGHHPRDCLFYLRDWTALRLQKLLQDNNVMFNTEPPAGARAVPGGGCRVIEQKEVPNGLRDEACGKETPAGYAGLCQAHYKEYLVSLINAHSLDPATLYEVEELETATERYLHVRPQPLAGEDPPAYQARLLQKLTEEVPLGQSIPRRRK

SEQ ID NO: 287 - DNA, 903 bp, Homo sapiens
cggcggcggcgacaggaccgaggggccttagttggtgggcaagtcggggatcccagaaagagaagcgtgacccggaagcggaaacgggtgtccgtcccagctccggcctgccagtgagcttctaccatcatggacctattgttcgggcgccggaagacgccagaggagctactgcggcagaaccagagggccctgaaccgtgccatgcgggagctggaccgcgagcgacagaaactagagacccaggagaagaaaatcattgcagacattaagaagatggccaagcaaggccagatggatgctgttcgcatcatggcaaaagacttggtgcgcacccggcgttatgtgcgcaagtttgtattgatgcgggccaacatccaggctgtgtccctcaagatccagacactcaagtccaacaactcgatggcacaagccatgaagggtgtcaccaaggccatgggcaccatgaacagacagctgaagttgccccagatccagaagatcatgatggagtttgagcggcaggcagagatcatggatatgaaggaggagatgatgaatgatgccattgatgatgccatgggtgatgaggaagatgaagaggagagtgatgctgtggtgtcccaggttctggatgagctgggacttagcctaacagatgagctgtcgaacctcccctcaactgggggctcgcttagtgtggctgctggtgggaaaaaagcagaggccgcagcctcagccctagctgatgctgatgcagacctggaggaacggcttaagaacctgcggagggactgagtgcccctgccactccgagataaccagtggatgcccaggatcttttaccacaacccctctgtaataaaagagatttgacactaaaaaaaaaaaaaaaaaaaaaaa

SEQ ID NO: 288 - protein, 222 aa, Homo sapiens
MDLLFGRRKTPEELLRQNQRALNRAMRELDRERQKLETQEKKIIADIKKMAKQGQMDAVRIMAKDLVRTRRYVRKFVLMRANIQAVSLKIQTLKSNNSMAQAMKGVTKAMGTMNRQLKLPQIQKIMMEFERQAEIMDMKEEMMNDAIDDAMGDEEDEEESDAVVSQVLDELGLSLTDELSNLPSTGGSLSVAAGGKKAEAAASALADADADLEERLKNLRRD

SEQ ID NO: 289 - DNA, 4471 bp, Homo sapiens
ttcggtggcctctagtgagatctggaggatccaaggattctgtagctacaatgttgtcaagactttttcgaatgcatggcctctttgtggcctcccatccctgggaagtcatagtggggacagtgacactgaccatctgcatgatgtccatgaacatgtttactggtaacaataagatctgtggttggaattatgaatgtccaaagtttgaagaggatgttttgagcagtgacattataattctgacaataacacgatgcatagccatcctgtatatttacttccagttccagaatttacgtcaacttggatcaaaatatattttgggtattgctggccttttcacaattttctcaagttttgtattcagtacagttgtcattcacttcttagacaaagaattgacaggcttgaatgaagctttgccctttttcctacttttgattgacctttccagagcaagcacattagcaaagtttgccctcagttccaactcacaggatgaagtaagggaaaatattgctcgtggaatggcaattttaggtcctacgtttaccctcgatgctcttgttgaatgtcttgtgattggagttggtaccatgtcaggggtacgtcagcttgaaattatgtgctgctttggctgcatgtcagttcttgccaactacttcgtgttcatgactttcttcccagcttgtgtgtccttggtattagagctttctcgggaaagccgcgagggtcgtccaatttggcagctcagccattttgcccgagttttagaagaagaagaaaataagccgaatcctgtaactcagagggtcaagatgattatgtctctaggcttggttcttgttcatgctcacagtcgctggatagctgatccttctcctcaaaacagtacagcagatacttctaaggtttcattaggactggatgaaaatgtgtccaagagaattgaaccaagtgtttccctctggcagttttatctctctaaaatgatcagcatggatattgaacaagttattaccctaagtttagctctccttctggctgtcaagtacatcttctttgaacaaacagagacagaatctacactctcattaaaaaaccctatcacatctcctgtagtgacacaaaagaaagtcccagacaattgttgtagacgtgaacctatgctggtcagaaataaccagaaatgtgattcagtagaggaagagacagggataaaccgagaaagaaaagttgaggttataaaacccttagtggctgaaacagataccccaaacagagctacatttgtggttggtaactcctccttactcgatacttcatcagtactggtgacacaggaacctgaaattgaacttcccagggaacctcggcctaatgaagaatgtctacagatacttgggaatgcagagaaaggtgcaaaattccttagtgatgctgagatcatccagttagtcaatgctaagcatatcccagcctacaagttggaaactctgatggaaactcatgagcgtggtgtatctattcgccgacagttactttccaagaagctttcagaaccttcttctctccagtacctaccttacagggattataattactccttggtgatgggagcttgttgtgagaatgttattggatatatgcccatccctgttggagtggcaggacccctttgcttagatgaaaaagaatttcaggttccaatggcaacaacagaaggttgtcttgtggccagcaccaatagaggctgcagagcaataggtcttggtggaggtgccagcagccgagtccttgcagatgggatgactcgtggcccagttgtgcgtcttccacgtgcttgtgactctgcagaagtgaaagcctggctcgaaacatctgaagggttcgcagtgataaaggaggcatttgacagcactagcagatttgcacgtctacagaaacttcatacaagtatagctggacgcaacctttatatccgtttccagtccaggtcaggggatgccatggggatgaacatgatttcaaagggtacagagaaagcactttcaaaacttcacgagtatttccctgaaatgcagattctagccgttagtggtaactattgtactgacaagaaacctgctgctataaattggatagagggaagaggaaaatctgttgtttgtgaagctgtcattccagccaaggttgtcagagaagtattaaagactaccacagaggctatgattgaggtcaacattaacaagaatttagtgggctctgccatggctgggagcataggaggctacaacgcccatgcagcaaacattgtcaccgccatctacattgcctgtggacaggatgcagcacagaatgttggtagttcaaactgtattactttaatggaagcaagtggtcccacaaatgaagatttatatatcagctgcaccatgccatctatagagataggaacggtgggtggtgggaccaacctactacctcagcaagcctgtttgcagatgctaggtgttcaaggagcatgcaaagataatcctggggaaaatgcccggcagcttgcccgaattgtgtgtgggaccgtaatggctggggaattgtcacttatggcagcattggcagcaggacatcttgtcaaaagtcacatgattcacaacaggtcgaagatcaatttacaagacctccaaggagcttgcaccaagaagacagcctgaatagcccgacagttctgaactggaacatgggcattgggttctaaaggactaacataaaatctgtgaattaaaaaagctcaatgcattgtcttgtggaggatgaataaatgtgatcactgagacagccacttggtttttggctctttcagagaggtctcaggttctttccatgcagactcctcagatctgaacacagtttagtgctttacatgctgtgctctttgaagagatttcaacaagaatattgtatgttaaagcatcagagatggtaatctacagctcacctctgaaagcaaatataagctgggaaaaaagttttgatgaaattcttgaagttcatggtgatcagtgcaattgaccttctccctcactcctgccagttgaaaatggatttttaaattatactgtagctgatgaaactcctgattttgtagttaatttattaagtctgggatgtagaacttcaagaagtaagagctaagttctaagttcatgtttgtaaattaatacttcatttggtgctggtctattttgattttggggggtaatcagcattattcttcagaaggggacctgttttcttcaagggaagaaacactcttattcccaaactacagaataatgtgttaaacatgctaaatagttctatcaggaaaacaaatcactgtatttatctccgcaggctatttgttcagagaggccttttgtttaaatataaatgtttaaatataaatgtttgtctggattggctataacatgtctttcagcattaggcttttaagaaacacagggttttgtattctttactaaagatatcagagctcttaatgttgcttagatgagggtgactgtcaagtacaagcaagactgggaccttagaaatcattgtagaaacacagttttgaaagatttttaccatgtctctaagccaactttaattgcttaaaagacatttttatttagttgaaaaatctagttttttttgtaaactgtaccaaatctgtatatgttgtaataaaacttatgctagtttattggaagtgttcaagaaataaaaatcaacttgtgtactgataaaatactctagcctgggccagagaagataatgttctttaatgttgtcaggaaaccctggcttgcttgccgagcctaatgaaagggaaagtcagctttcagagccagtgaaggagccacgtgaatggccctagaactgtgcctagttcctgtggccaggaggttggtgactgaaacattcacacagggctcttggatggacccacgaacgctcttagctttctcagggggtcagcagagttattgaatcttaattttttttaatgtacaagttttgtataaataataaagaactccttattttgtattacatctaatgcttaagtgttgctcttggaaagctgatgatgtctcttgtagagatgactctgaaaaacattccaggaaaccatggcagcatggagagcctcttagtgattgtgtctgcattgttattgtggaagatttaccttttctgttgtacgtaaagcttaaattacttttgttgtgactttttagccagtgactttttctgagcttttcatggaagtggcagtgaaaaatatgttgagtgttcaaaaaagtgactgtaattaatatcttgctggattaatgttttgtacaattactaaattgtatacattttgttatagaatacttttttctagtttcagtaaataatgaaaaggaagttaatacca

SEQ ID NO: 290 - protein, 888 aa, Homo sapiens [sequence omitted]

SEQ ID NO: 291 - DNA, 1904 bp, Homo sapiens
gagaaggcccaggaagtgacggccgcctcccggctaccggggacttctggagtccgagaagtcaacggcgcggttgctgcggccgccgcgctccccggcccgaggcgatggagaacggagcggtgtacagccccactacggaggaggacccgggccccgccagaggcccccggagcggcctcgctgcctactttttcatgggccggctcccattgctccggcgcgttctcaagggcttgcagctgttgctgtctctgctggccttcatctgtgaagaagttgtatcacaatgtactttatgtggaggactttatttttttgagtttgtaagctgcagtgcctttcttctgagtctccttatactgattgtgtattgcactccattttatgagagagttgataccacaaaagtaaaatcatcggatttttatattactttgggaacaggatgtgtgtttttgttggcatccatcatttttgtttccacacatgacaggacttcagctgagattgctgcaattgtgtttggatttatagcaagttttatgttcctacttgactttatcactatgctgtatgaaaaacgacaggagtcccagctgagaaaacctgaaaataccactagggctgaagccctcactgagccacttaatgcctaaagactctggggagcagatgttacctaaggtagtgaccctgcattgtggtgcctgagccctggcagaagctcttgtaaaatttgttaattgtttaaaccacttcttttggagagcaaggggaaggtcaagaaggcagttttatcaatattgtgtcagtcaccacaaagtaggccagataagttaaaaaaaatttttttttaaataataattgaaacttatctcaaatggagattttggtgggaggaggagaaaacaattgtttttaaatcacacagctcaacggttgataaatgattctgtcattctgttacaggtcattcttttactaggcttagcttccaaattatgctttatagctgtataaacatcgtgattatattcatctacttagaaattgttttatttttaaattaatttgcttagctgtttgttttgatgcttagattatgttctgttaatgggaatttaacatatttaagaaaccaatatttaaaatgttggtctaggtttttttccttaacatatattaccaggctttactgtatttcactcagccttaaatgttataatatttttggataacggttattaattctttgagaccttcgtatagcctataaaatgtatgggagatgttggtattttatgtgtataaaagcaacaatatcagcaacttcgtgtttatactgcaccttggttgttgatgtcaagtaaaaaaaagattgttttgtaacacataaaaaaatggaagaaactgataccacacctaaggaccaaagataagaaagactttttgcccaagacagtgaaagtaattataaaaacaagctttgaccacttaccaagtatctgaagagatgagttcatactatgatttagaaagtggttcgattcccctgttggcatatgattatttttactaaaattaatacagctctgtgggtcttccttagtgttttctttgaagccaatctgttttttttaggacaccagcctttggtttttcatctgttcgagatgcctcttctctgtctccttatcagatagaaatggagtcatgtgctgctgcttcatctagcagaggttggcctctggctctgacactttttgtcagttgtctttaggtggtcctgaatcttgggcccttttgattgtgaatactgtgtagcaggatcttgagagtccttgttcttacataggcattgctctagtttgtctttggcaaaaaaaaaaaaaaaaaaaaaa

SEQ ID NO: 292 - protein, 183 aa, Homo sapiens
MENGAVYSPTTEEDPGPARGPRSGLAAYFFMGRLPLLRRVLKGLQLLLSLLAFICEEVVSQCTLCGGLYFFEFVSCSAFLLSLLILIVYCTPFYERVDTTKVKSSDFYITLGTGCVFLLASIIFVSTHDRTSAEIAAIVFGFIASFMFLLDFITMLYEKRQESQLRKPENTTRAEALTEPLNA

SEQ ID NO: 293 - DNA, 5744 bp, Homo sapiens
agcgcatggagccagaggaggaggatgaactaggctcagggcgggatgtggattccaactccaacgcggacagtgagaaatgggtggcaggagatggtttggaagaacaggaattttctatcaaggaggcaaacttcacagagggaagtctgaagctaaagattcagaccacaaagcgggctaagaaacccccaaagaatttggagaactatatatgtccacctgagatcaagatcaccatcaagcagtctggggaccagaaggtgtcccgtgctggaaaaaatagcaaagccacgaaggaggaagaaagaagccactccaaaaagaagctcctcacagccagtgaccttgcagccagtgacctcaaaggatttcagccacaggcttacgaaaggccccagaaacattcaactctccattatgacacgggcctcccacaggacttcaccggtgacaccttaaaaccaaagcaccagcaaaaaagcagcagccagaaccacatggactggtccaccaactctgacagcggacccgtcactcagaattgcttcatcagtccagagtctggcagagaaactgcaagcaccagcaagatccccgctcttgagcccgtggcttcctttgcaaaggcccagggtaagaaaggcagtgcagggaacacgtggagtcagttgtctaacaataacaaagatctgctcttgggaggtgtggctccatccccaagcagccacagctcaccagccccacccagcagctctgctgagtgcaacgggcttcagcccttggtggatcaagatggaggaggtacaaaggagcccccagaaccacctacggtgggcagcaagaaaaagtccagtaaaaaagatgtgataagtcagaccataccaaacccagacctggattgggtcaagaatgcccagaaagcatttgacaatacagaagggaaaagggaaggttattccgcagatagtgcccaagaggcatcaccagccaggcagaacgtgagttctgccagtaatcctgaaaatgactcaagtcatgtccggattactatccccatcaaggcaccctctctggatccaaccaaccataagaggaaaaaaagacagtccattaaagcggtggtggaaaagatcatgccagagaaagccttggcttctggaatcaccatgagcagtgaagtagttaacaggatactttccaactctgaggggaataagaaggatccccgtgtccctaagttgagtaaaatgatagagaatgagtccccctcagttggccttgaaactggtggaaatgctgagaaagttatcccaggaggtgtgtctaagccgcggaagccacccatggtcatgacacctccaacgtgcacagatcactctccatccagaaagctgccagaaatccagcatccaaaatttgctgcaaaacgaaggtggacttgcagcaaaccaaaacctagcaccatgcttcgagaggcagttatggccacctctgataaactgatgctggagcccccgtctgcatatcccatcaccccatccagccctctctacaccaacacagacagtcttactgtgatcactccagtcaaaaagaagcggggacgaccaaagaagcagcctttgctcacagtcgagacgattcatgagggaacttccaccagccccgtcagtcccatcagccgagagtttcctggcactaagaaaagaaagcgacgacgcaatttagcgaagttggcccagctagtgccgggagaggacaaacccatgagcgagatgaaatttcacaagaaagttggaaagctcggcgtgttggataagaagaccatcaaaactatcaataagatgaagacactcaagaggaaaaacatcttgaatcagatcttgtcctgttccagcagcgttgctctgaaggcaaaagctcccccagagaccagccctggggcagcagccattgaaagcaaactgggcaagcagattaatgtcagcaagaggggaaccatctacattggcaagaagcggggcaggaagccaagagcagagctgccacccccatccgaagaacccaaaacagccatcaagcaccccaggcctgtttctagccagccggatgttccagccgtgccttccaactttcagtcacttgtggcgtcttcaccagcagctatgcacccactttcaacacagttaggtgggtccaatggcaacctgagccctgccagcactgaaaccaatttttcagagttgaaaactatgccaaatctccagcccatcagtgctcttccaaccaaaacccaaaagggaatacacagtggaacctggaagctgtctccacccagactgatggccaactccccttcacacctgtgcgagattggctccctaaaggaaatcacgctgtcccctgtgagcgagtcccacagtgaggagacgatccccagcgacagcggcattgggacagacaacaacagcacttctgaccaagcggagaagagctcagaatcccgaaggaggtactcttttgatttctgctccctggacaacccggaggccattccgtccgacaccagcacaaagaaccggcatggccaccggcaaaagcatctcattgtggacaactttctggcccacgaaagcctcaagaagccaaagcacaagaggaaacggaaaagcctgcaaaaccgcgatgacctccagtttctggcagacctggaggagctaatcaccaagttccaagtgttcagaatctcccaccggagttacaccttctaccacgagaatccatatcccagcatttttcggattaattttgatcactattacccggtgccatatatccagtatgacccgttgctctatcttcgtaggacttcagacttgaagtcaaagaagaagcgtggtaggcctgcaaaaaccaatgacaccatgacaaaggtgccttttttacaagggttcagctaccctattcccagtggaagttactatgcaccctatggaatgccttacacatcaatgcctatgatgaaccttggttattacggtcagtacccagctcctttgtacctatcgcacacgcttggagcagcttccccattcatgaggccaacagtgccaccacctcagttccacacaaactcccacataaagatgtccggtgcagctaagcataaagccaagcatggagtacacctgcagggacctgttagcatgggccttggtgacatgcagccttctctgaaccctcccaaggtaggcagtgccagtctgtccagtggtcggctccataagaggaaacacaaacacaagcataagcacaaggaagaccggatcctagggacccatgacaacctgagtggtctttttgcaggcaaagccacaggcttctccagccacatcctgagcgagcggctgagtagcgcagacaaagagctcccgctggtgagtgagaagaacaagcataaggagaaacagaagcaccagcacagcgaagccggccacaaagcttctaagaacaactttgaggtggacaccctgtctacactgtcactttccgacgcccagcattggacacaggccaaggaaaaaggagacttgagcagtgagcctgtggactcatgcacgaaaagatactctggcagtggcggggatggtggcagcacgagatcggagaacctggacgtgttcagtgaaatgaacccttcgaatgacaagtgggacagtgacgtgagtgggagtaaaaggaggagctatgaaggctttggaacgtacagggaaaaggacatccaagccttcaagatgaaccgcaaggagagaagttcttatgactcctccatgtctccagggatgccaagtccccacttaaaagtggaccagacagcagtgcatagtaagaacgaaggctcagtgcccaccatgatgaccaggaagaagccagccgcagttgacagtgttacaattccaccagccccagtgttatctctccttgctgcatctgcagcaacgtcggatgcagtcggctcctccctgaagaagaggttcaagcggcgggagatcgaagccatccagtgcgaagtgcggaagatgtgcaactacaccaagatcctgtccaccaagaagaacctggaccacgtgaacaagatcctgaaggccaagcggctgcagagacaatcaaaaacaggcaacaacttcgtgaagaagaggcgcgggcgtcccaggaagcagcccacccagttcgatgaggactccagagaccaaatgccggtgctggaaaaatgcatcgacctgcccagcaaaagaggccagaagcccagcctgagcccgctggtgctggagcccgccgccagccaagacaccatcatggccaccatcgaggcggtcatccacatggcccgggaggcgccgcccctgcccccgccaccgccgccgcccctgccgccaccgccgccaccacccctgcccccgccaccccctctacccaagaccccccgaggcggaaagaggaaacacaaaccgcaggcccccgctcagcccccacagcagtcgcccccgcagcagccccttccccaggaagaggaggtgaaagccaaaaggcagaggaagtcccgagggagtgagagcgaggtccttccctagggcgggtctgggcgtctgcacctggggcctagggaactgacacgtgggaagcgcagtgagccggggcgggggcggaatcccccgctgcagggacacccacgcccttctctccagaagccgggcaggcagaatccggccagacgacggggctgagccatcaggagctcttgggaaagcaaagcagggagacaccttcagaagaagcttgtctgagcttcaccgcagctcccaccacgcggcgcttcagtacggctggatcctccgcaggcgagcggaaggcccccaggaggagcaggctggtggcactctcctgacctcacgctgccaaggtgcgccctcgactcccgatttcatttgctggccaggaaaatcgaaagggaaacaccctcaattaggaaacattccaaggggagaaaagctgcaaattgctcaactggcattgctgtaacccgttccatttaattggtttttatttcttttgattttcaagctctgctaagctttggggtaccaacgtcatcttcaggtgacctgaatctttcccttaaccgtacagtttctcgatggaattgtgtgatcagaaggtggaattctagtgataggcgacctcagacccgcattcatgttctgtgtgcctcttctattgcacatacactgatttttagcattgtctattcctatttttcctttgcccattgtacttccatatatcttttcattaacttacttgctgccttttttttttcttggtacacatttaaataaagtaatccttaacctgtgctgtaaagttcacccttggcatgctgttccaagaacctgggtttgaatcccaatcgttgtgaaacatactcagtattgataaaacctttttaataagtgatgcagagcagccaaggatatgttgacccagatgtcaaccaggctatttttatacttaaaacatgtcagcagagcataggcagaataaaatggtttaaataccccacagcaaatagagtaactgacaaaccaccaaaaactgaaaccccagacccaccagaaagacaagtgtctagcaatgccttggtacctgatctttttcattcaaataattgtcataggttgttc

SEQ ID NO: 294 - protein, 1542 aa, Homo sapiens
MEPEEEDELGSGRDVDSNSNADSEKWVAGDGLEEQEFSIKEANFTEGSLKLKIQTTKRAKKPPKNLENYICPPEIKITIKQSGDQKVSRAGKNSKATKEEERSHSKKKLLTASDLAASDLKGFQPQAYERPQKHSTLHYDTGLPQDFTGDTLKPKHQQKSSSQNHMDWSTNSDSGPVTQNCFISPESGRETASTSKIPALEPVASFAKAQGKKGSAGNTWSQLSNNNKDLLLGGVAPSPSSHSSPAPPSSSAECNGLQPLVDQDGGGTKEPPEPPTVGSKKKSSKKDVISQTIPNPDLDWVKNAQKAFDNTEGKREGYSADSAQEASPARQNVSSASNPENDSSHVRITIPIKAPSLDPTNHKRKKRQSIKAVVEKIMPEKALASGITMSSEVVNRILSNSEGNKKDPRVPKLSKMIENESPSVGLETGGNAEKVIPGGVSKPRKPPMVMTPPTCTDHSPSRKLPEIQHPKFAAKRRWTCSKPKPSTMLREAVMATSDKLMLEPPSAYPITPSSPLYTNTDSLTVITPVKKKRGRPKKQPLLTVETIHEGTSTSPVSPISREFPGTKKRKRRRNLAKLAQLVPGEDKPMSEMKFHKKVGKLGVLDKKTIKTINKMKTLKRKNILNQILSCSSSVALKAKAPPETSPGAAAIESKLGKQINVSKRGTIYIGKKRGRKPRAELPPPSEEPKTAIKHPRPVSSQPDVPAVPSNFQSLVASSPAAMHPLSTQLGGSNGNLSPASTETNFSELKTMPNLQPISALPTKTQKGIHSGTWKLSPPRLMANSPSHLCEIGSLKEITLSPVSESHSEETIPSDSGIGTDNNSTSDQAEKSSESRRRYSFDFCSLDNPEAIPSDTSTKNRHGHRQKHLIVDNFLAHESLKKPKHKRKRKSLQNRDDLQFLADLEELITKFQVFRISHRSYTFYHENPYPSIFRINFDHYYPVPYIQYDPLLYLRRTSDLKSKKKRGRPAKTNDTMTKVPFLQGFSYPIPSGSYYAPYGMPYTSMPMMNLGYYGQYPAPLYLSHTLGAASPFMRPTVPPPQFHTNSHIKMSGAAKHKAKHGVHLQGPVSMGLGDMQPSLNPPKVGSASLSSGRLHKRKHKHKHKHKEDRILGTHDNLSGLFAGKATGFSSHILSERLSSADKELPLVSEKNKHKEKQKHQHSEAGHKASKNNFEVDTLSTLSLSDAQHWTQAKEKGDLSSEPVDSCTKRYSGSGGDGGSTRSENLDVFSEMNPSNDKWDSDVSGSKRRSYEGFGTYREKDIQAFKMNRKERSSYDSSMSPGMPSPHLKVDQTAVHSKNEGSVPTMMTRKKPAAVDSVTIPPAPVLSLLAASAATSDAVGSSLKKRFKRREIEAIQCEVRKMCNYTKILSTKKNLDHVNKILKAKRLQRQSKTGNNFVKKRRGRPRKQPTQFDEDSRDQMPVLEKCIDLPSKRGQKPSLSPLVLEPAASQDTIMATIEAVIHMAREAPPLPPPPPPPLPPPPPPPLPPPPPLPKTPRGGKRKHKPQAPAQPPQQSPPQQPLPQEEEVKAKRQRKSRGSESEVLP

SEQ ID NO: 295 - DNA, 1083 bp, Homo sapiens
gccgcttttttttttttctcatctgccatttgtgtgtcttagatgggttttaattgcatgaatgtggctaatgtggttctcagaaattggtcagtatggcccgacatagcttctgctctgtcttgctgactcaatacctttaggatttgtatcagagtttggatactagtgttagtggtggtgtcaccactacttaattgggagataatgaaaccaatcatggatgctgtttttattgggcatgtcatctaagagaggagaaatagctgggttttgggtctaattatgaataaggactgattcagaaaacgagtttatggtaggtagactaaagtttcacatcagactgtaccattgtgatttagacctatctaaaattcagagcatatcatctgggctacctcagggtcaccacccatgtattgggcttagtcaggattgacagatacattctcagctggcctgtcatataaaacatactgtcattgagcttaagctccgcttgttctgaggtttcacctccatgtgtttcattggtgcaaaagtggatctcttagttggtcacttaattctttctttttcagaaagatagtatgttcactggtatatttggtcactcttagaaccttccttcacattgttttttatgggacccatgaatggttagcctttcttttctattgtagaaggaaataaataggagtaaaaagaccattgtagtaaataagttcaaggggaacttgggaccagaaaccactgttatgtacaaaaaaatggcaaattcaataaactcaaatttaaaataatttttaaattaacagttatgataaattttatattttatacaaatagattgcttagaatggttctcaagaattataagagaaatgaactcacagtacaaaaattttataattactatacttgtgttttgtttgggggctgggaaatgtatttttacattgtagccaatcattttatatttgtcaatttaaatcttatgggtctttttttttttatctctcttgatgtcagattttatagtctttttaaataaatccatttaattaaaacgttaaaaaa

SEQ ID NO: 296 - protein, 77 aa, Homo sapiens
MINFIFYTNRLLRMVLKNYKRNELTVQKFYNYYTCVLFGGWEMYFYIVANHFIFVNLNLMGLFFFISLDVRFYSLFK

SEQ ID NO: 297 - DNA, 2010 bp, Homo sapiens
gtcgactaccagaaaatactttcaacataaatgaactctccaacttattaaacttttatatagatagaggaagacagctctttcgggataaccacctgatacctgcagaaacccccagtcctgttattttcagtgattttccatttatctttaattcgctatccaaaattaaattattgcaagctgattcacatataaagatgcagatgtcagaaaagaaagcatacatgcttatgcatgaaacaattctgcaaaaaaaggatgaatttcctccatcacccagatttatacttagagtcagacgaagtcgcctggttaaagatgctctgcgtcaattaagtcaagctgaagctactgacttctgcaaagtattagtggttgaatttattaatgaaatttgtcctgagtctggaggggttagttcagagttcttccactgtatgtttgaagagatgaccaagccagaatatggaatgttcatgtatcctgaaatgtgttcctgcatgtggtttcctgccaagcctaaacctgagaagaaaagatatttcctctttggaatgctgtgtggactctccttattcaatttaaatgttgctaaccttcctttcccactggctctgtataaaaaacttctggaccaaaagccatcattggaagatttaaaagaactcagtcctcggttggggaagagtttgcaagaagttctagatgatgctgctgatgacattggagatgcgctctgcatacgcttttctatacactgggaccaaaatgatgttgacttaattccaaatgggatctccatacctgtggaccaaaccaacaagagagactatgtttctaagtatattgattacattttcaacgtctctgtaaaagcagtttatgaggaatttcagagaggattttatagagtctgtgagaaggagatacttagacatttctaccctgaagaactaatgacagcaatcattggaaatactgattatgactggaaacagtttgaacagaattcaaagtatgagcaaggataccaaaaatcacatcctactatacagttgttttggaaggctttccacaagctaaccttggatgaaaagaaaaaattcctctttttccttacaggacgtgataggctgcatgcaagaggcatacagaaaatggaaatagtatttcgctgtcctgaaactttcagtgaaagagatcacccaacatcaataacttgtcataatattctctccctccctaagtattctacaatggaaagaatggaggaagcactccaagtagccatcaacaacaacagaggatttgtctcacccatgctcacacagtcataatcacctctgagagactcagggtgggctttctcacacttggatccttctgttcttccttacacctaaataatacaagagattaatgaatagtggttagaagtagttgagggagagattgggggaatggggagatgatgatgatggtcaaagggtgcaaaatctcacacaagactgaggcaggagaatagggtacagagatagggatctaaggatgacttggacacactccctggcactgaagagtctgaacactggcctgtgattggtccattccaggaccttcatttgcataaggtatcaaaccacatcagcctctgattggccatgggccagacctgcactctggccaatgattggttcattccaggacattcatttgcataaggagtcaaaccacaccagtcttggattggctgtgagccaattcacctcagtctctaattggctgtgagtcagtctttcatttacatagggtgtaaccatcaagaaacctctacagggtacttaagccccagaagattttgctaccagggctcttgagccacttgctctagcccactcccaccctgtggaatgtactttcacttttgctgcttcactgccttgtgctccaataaatccactccttcaccacccaaaaaaaaaaaaaaaaaaaaaaaaaaaaaaaaaa

SEQ ID NO: 298 - protein, 379 aa, Homo sapiens
MQMSEKKAYMLMHETILQKKDEFPPSPRFILRVRRSRLVKDALRQLSQAEATDFCKVLVVEFINEICPESGGVSSEFFHCMFEEMTKPEYGMFMYPEMCSCMWFPAKPKPEKKRYFLFGMLCGLSLFNLNVANLPFPLALYKKLLDQKPSLEDLKELSPRLGKSLQEVLDDAADDIGDALCIRFSIHWDQNDVDLIPNGISIPVDQTNKRDYVSKYIDYIFNVSVKAVYEEFQRGFYRVCEKEILRHFYPEELMTAIIGNTDYDWKQFEQNSKYEQGYQKSHPTIQLFWKAFHKLTLDEKKKFLFFLTGRDRLHARGIQKMEIVFRCPETFSERDHPTSITCHNILSLPKYSTMERMEEALQVAINNNRGFVSPMLTQS

SEQ ID NO: 299 - DNA, 3906 bp, Homo sapiens
ctggcgcgcgcacgcgcacgcgcacgcccaccgcgcggcttcccccgctccccggtgctgaggagagagcgatccgagggactgcgccgcccggacggcctgcagagcgctgccatcatgagtgaaattcgtaaggacaccttgaaggccattctgttggagttagaatgtcattttacatggaatttacttaaggaagacattgatctgtttgaggtagaagatacaattgggcaacagcttgaatttcttaccacaaaatctagacttgctctttataacctattggcctatgtgaaacacctaaaaggccaaaataaagacgcccttgagtgcttggaacaagcagaagaaataatccagcaagaacactcagacaaagaagaagtacgaagcctggtcacttggggaaactatgcctgggtgtattatcacatggaccagcttgaagaagctcagaagtatacaggtaagatagggaatgtctgtaagaaattgtccagtccttctaactacaagttggagtgtcctgagactgactgtgagaaaggctgggcactcttgaaatttggaggaaagtattatcaaaaggctaaagcggcttttgagaaggctctggaagtggagcctgacaatccagaatttaacatcggctatgctatcacagtgtatcggctggatgattctgatagagaagggtctgtaaagagcttttctctggggcctttgagaaaggctgttaccctgaacccagataacagctatattaaggtttttctggcactgaagcttcaagatgtacatgcagaagctgaaggggaaaagtatattgaagaaatcctggaccaaatatcatcccagccttacgtccttcgttatgcagccaagttctataggagaaaaaattcctggaacaaagctctcgaacttttaaaaaaggccttggaggtgacaccaacttcttctttcctgcatcaccagatgggactttgctacagggcacaaatgatccaaatcaagaaggccacacacaacagacctaaaggaaaggataaactaaaggttgatgagctgatttcatctgctatatttcatttcaaagcagccatggaacgagactctatgtttgcatttgcctacacagacctggccaacatgtatgctgaaggaggccagtatagcaatgctgaggacattttccggaaagctcttcgtctggagaacataaccgatgatcacaaacatcagatccattaccactatggccgctttcaggaatttcaccgtaaatcagaaaatactgccatccatcattatttagaagccttaaaggtcaaagacagatcaccccttcgcaccaaactgacaagtgctctgaagaaattgtctaccaagagactttgtcacaatgctttagatgtgcagagtttaagtgccctagggtttgtttacaagctggaaggagaaaagaggcaagctgctgagtactatgagaaggcacaaaagatagatccagaaaatgcagaattcctgactgctctctgtgagctccgactttccatttaaatacatactctaggaaattagctctaagtttttcccttcattttgggttctcctgtttgttttttttttattattttaatcccttgtttattatagagctaatatttattgaatagttattgtgtaccaagcattgtgctaaatactttatatgcattatgatgaatcttgtgcggttttctttctttttttctttttaattaaaatactataatccattgagaaatagcaatattctagctattgtaacttctaaaaatggtatggccattagatctgtgctttttatctctgctctttgaatttctcatattatatagtaaatatattcctacgtaaacctttgatacctagatcaggaatactcttccaggagtacaaaattacattattgatagttaagctcttaattgtgtagcttgcaaaagacagcactttttagttacagatgttttgactttgatgaggatatttagctatcaatctaatagtcacctaaaatatcttttttgttggaaaaaagtttataataaaaaagtttgtcatctctagtgacttcaataaagaaaaaactagaagaggagaaaaaggatttcctcaaattttaaatatgtaacttcagggattcaatccccaaatgtttattaagtagctagaaataattatgtggaaaaaaatgaataatggaaaatagtgagtctcaaattgtttttttttaactaaaatctgcaatgaatctagatgcaattaattttattccttccaactaaaattacaatatttttaggttaaaattattgagatataaagcagccattgggaaattgggagaaatgataaacaaatggaaaaagaagatgtccctaacctacacccatagattaccaaggtttcagtgtactagttttgaatctgttctgaatggagtttttataccctcaatttctggcctttggctattttagcatttcaaagtgacttctatgaagctttttttttaatgtgaaattttcagaatgttgtttttttcatgtagatactccaggaagagttaagcactgctttcagttttaatatccaccttgaggggtcgctgcttgagggctcttatcccaggggactttttaattcggatgttacttaatgtggcttctctaatgtagtttctttgattaccgactacacaattatgtaccatcacagtattagtggaaaagtaccatgtgatttaattctccattcctccaatgtaactcttaaaattattatgtatgtgtatgtgttttactttttgttttttatcatctttaaaatttctattatggtttgattattataaaaataatgaattctcactgtaaatttcaaaaaaaaaattacaaaagtatgtgaatttaaaaatgagagcagtcccctcaccctaccacagttccacaccctcaaggtaaacttataacttataatttgatatgtaaacttccagatcttttttctatgcgtaatcagacatacatatatactgcagtgtatctcacgtattaatttttaaaaatcttttgttttacttaattctgtttttattattattattattttgtttgatctattaaggaagaacaaggaagggaatgatctttactcaagaatttcagaaagtcagcactgaagtcctgacctatcagtagacacatttgtccctttcagatattttaggatattctagcaaagcaggccatttctcccacctgaaagtacataacttctatcacttgccacataattaaaagaactcacattaagcggttactcagacagttaatcatagaaaagattatttgcttcatcagttcatagaaaagattatttgcttcatcagttaacttgtttttataaatcagggcctgtgttcatacacagaaggggcctgagatttctgcactttaaacaagctcctcctaggtgaggatgctgtggctgttctaattacattttgagtagtaaggtctacagcattgttcctcaaacttggctacgtattggaatcacctaaaaagttaaaacaaaacatggatgtctgggtcccgccccatagagaatgacttaattggcatggggtgcagtccaggcatcatgatttttagatttcccagttggaacttgtgcagcaaagtttgggagctactgatggacatgtgaaaagtaagtataaatggaataaaattaattaggctaataggcttaacccaggaaatcctaagttccttgaatatccagtttgcatttgggactcctcatcatatacttggtatataatactctaataaaagctgcctgagttga

SEQ ID NO: 300 - protein, 482 aa, Homo sapiens
MSEIRKDTLKAILLELECHFTWNLLKEDIDLFEVEDTIGQQLEFLTTKSRLALYNLLAYVKHLKGQNKDALECLEQAEEIIQQEHSDKEEVRSLVTWGNYAWVYYHMDQLEEAQKYTGKIGNVCKKLSSPSNYKLECPETDCEKGWALLKFGGKYYQKAKAAFEKALEVEPDNPEFNIGYAITVYRLDDSDREGSVKSFSLGPLRKAVTLNPDNSYIKVFLALKLQDVHAEAEGEKYIEEILDQISSQPYVLRYAAKFYRRKNSWNKALELLKKALEVTPTSSFLHHQMGLCYRAQMIQIKKATHNRPKGKDKLKVDELISSAIFHFKAAMERDSMFAFAYTDLANMYAEGGQYSNAEDIFRKALRLENITDDHKHQIHYHYGRFQEFHRKSENTAIHHYLEALKVKDRSPLRTKLTSALKKLSTKRLCHNALDVQSLSALGFVYKLEGEKRQAAEYYEKAQKIDPENAEFLTALCELRLSI

SEQ ID NO: 301 - DNA, 634 bp, Homo sapiens
cggctgagaggcagcgaactcatctttgccagtacaggagcttgtgccgtggcccacagcccacagcccacagccatgggctgggacctgacggtgaagatgctggcgggcaacgaattccaggtgtccctgagcagctccatgtcggtgtcagagctgaaggcgcagatcacccagaagattggcgtgcacgccttccagcagcgtctggctgtccacccgagcggtgtggcgctgcaggacagggtcccccttgccagccagggcctgggccctggcagcacggtcctgctggtggtggacaaatgcgacgaacctctgagcatcctggtgaggaataacaagggccgcagcagcacctacgaggtccggctgacgcagaccgtggcccacctgaagcagcaagtgagcgggctggagggtgtgcaggacgacctgttctggctgaccttcgaggggaagcccctggaggaccagctcccgctgggggagtacggcctcaagcccctgagcaccgtgttcatgaatctgcgcctgcggggaggcggcacagagcctggcgggcggagctaagggcctccaccagcatccgagcaggatcaagggccggaaataaaggctgttgtaagagaat

SEQ ID NO: 302 - protein, 165 aa, Homo sapiens
MGWDLTVKMLAGNEFQVSLSSSMSVSELKAQITQKIGVHAFQQRLAVHPSGVALQDRVPLASQGLGPGSTVLLVVDKCDEPLSILVRNNKGRSSTYEVRLTQTVAHLKQQVSGLEGVQDDLFWLTFEGKPLEDQLPLGEYGLKPLSTVFMNLRLRGGGTEPGGRS

SEQ ID NO: 303 - DNA, 3998 bp, Homo sapiens
ccgggagcccgggcgccctggagtgaggaggaccgggagctggctctggaggctgcggaggcgacgccggagagaacgaagcctcggctgggagcggatctttcgaagatggtttggctgccttggagatttggagatctgatgccacgatgaggactcacacacggggggctcccagtgtgtttttcatatatttgctttgctttgtgtcagcctacatcaccgacgagaacccagaagttatgattcccttcaccaatgccaactacgacagccatcccatgctgtacttctccagggcagaagtggcggagctgcagctcagggctgccagctcgcacgagcacattgcagcccgcctcacggaggctgtgcacacgatgctgtccagccccttggaatacctccctccctgggatcccaaggactacagtgcccgctggaatgaaatttttggaaacaacttgggtgccttggcaatgttctgtgtgctgtatcctgagaacattgaagcccgagacatggccaaagactacatggagaggatggcagcgcagcctagttggttggtgaaagatgctccttgggatgaggtcccgcttgctcactccctggttggttttgccactgcttatgacttcttgtacaactacctgagcaagacacaacaggagaagtttcttgaagtgattgccaatgcctcagggtatatgtatgaaacttcatacaggagaggatggggatttcaatacctgcacaatcatcagcccaccaactgtatggctttgctcacgggaagcctagtcctgatgaatcaaggatatcttcaagaagcctacttatggaccaaacaagttctgaccatcatggagaaatctctggtcttgctcagggaggtgacggatggctccctctatgaaggagttgcgtatggcagctacaccactagatcactcttccaatacatgtttctcgtccagaggcacttcaacatcaaccactttggccatccgtggcttaaacaacactttgcatttatgtatagaaccatcctgccagggtttcaaaggactgtggctattgcggactcaaattacaactggttttatggtccagaaagccaattagtgttccttgataaatttgtcatgcgtaatggcagtggtaactggctagctgaccaaatcagaaggaaccgtgtggtggaaggtccaggaacaccatccaaagggcagcgctggtgcactctgcacacagaatttctctggtatgatggcagcttgaaatcggttcctcctccagactttggcacccctacactgcattattttgaagactggggtgtcgtgacttatggaagtgcactacctgcagaaatcaatagatctttcctttccttcaagtctggaaaactggggggacgtgcaatatatgacattgtccacagaaacaaatacaaagattggatcaaaggatggagaaattttaatgcagggcatgaacatcctgatcaaaactcatttacttttgctcccaatggtgtgcctttcattactgaggctctgtacgggccaaagtacaccttcttcaacaatgttttgatgttttccccagctgtgtcaaagagctgcttttctccctgggtgggtcaggtcacagaagactgctcatcaaaatggtctaaatacaagcatgacctggcagctagttgtcaggggagggtggttgcagcagaggagaaaaatggggtggttttcatccgaggagaaggtgtgggagcttataacccccagctcaacctgaagaatgttcagaggaatctcatcctcctacatccacagctgcttctccttgtagaccaaatacacctgggagaggagagtcccttggagacagcagcgagcttcttccataatgtggatgttccttttgaggagactgtggtagatggtgtccatggggctttcatcaggcagagagatggtctctataaaatgtactggatggacgatactggctacagcgagaaagcaacctttgcctcagtgacatatcctcggggctatccctacaacgggacaaactatgtgaatgtcaccatgcacctccgaagtcccatcaccagggcagcttacctcttcatagggccatctatagatgttcagagcttcactgtccacggagactctcagcaactggatgtgttcatagccaccagcaaacatgcctacgccacatacctgtggacaggtgaggccacaggacagtctgcctttgcacaggtcattgctgatcgtcacaaaattctgtttgaccggaattcagccatcaagagcagcattgtccctgaggtgaaggactatgctgctattgtggaacagaacttgcagcattttaaaccagtgtttcagctgctggagaagcagatactgtcccgagtccggaacacagctagctttaggaagactgctgaacgcctgctgagattttcagataagagacagactgaggaggccattgacaggatttttgccatatcacagcaacagcagcagcaaagcaagtcaaagaaaaaccgaagggcaggcaaacgctataaatttgtggatgctgtccctgatatttttgcacagattgaagtcaatgagaaaaagattagacagaaagctcagattttggcacagaaagaactacccatagatgaagatgaagaaatgaaagaccttttagattttgcagatgtaacatacgagaaacataaaaatgggggcttgattaaaggccggtttggacaggcacggatggtgacaactacacacagcagggccccatcactgtctgcttcctataccaggttgttcctgattctgaacattgctattttctttgtcatgttggcaatgcaactgacttatttccagagggcccagagcctacatggccaaagatgtctttatgcagttcttctcatagatagctgtattttattatggttgtactcttcttgttcccaatcacagtgttagcactgaagctataaattacctggtcattttgtgatcacaagagtctatgcaaaaaaaaaaatttctttaccccagattatcagatttttttccctcagattcattttaacaaattaagggaagatattttgacacaagaaagcaggaacgtggagaaattggagcaggaaaagaaattatcaaagcaatagaaatagcttggtggtcctatggtgtttttggaagtatttggcattgctaattgagcagtccatatagtactacttttagaagaaacaaaaagtctattttttaaagtaatgttttttcttatgagaaaaaggtttagatagaattgggttttattaatattaatttaatgctattagcaatttccatatactatattgtggaaaagactgaagaatacaattctgagaaatataaaaaaattttaatggtatactcatgttgaaagataaatgttgctaagtcctggtatgatggtgtgagcttccttggggaagtacttcttgagttatgtaactaacaggatgttttactacagatctggatggctattcagataacatggcaaaaaatgatagcagaagatcattaaaaacttaaaatatattttattagaaaacatttatctatgaatgaatatttccttgatgctggtctctgcacacatatgcttggttacttgcatgcattcattggttgttcaataagtgagatgattacagataatactgtattttccttatatggaaaaccgttatagacccaataacaactaaacctttcaaaagaaaatattttctattatgaatgttgattttcataccaaagaagatggagagtctaaaatttggatatgattcttatgtttttttaatagaaaaccttcttcaagtttattttcctaaataaacatcataattgtgaaaaaaaaaaaaaaaaaaaaaaaaaaaaaaaaaaaaaaaa

SEQ ID NO: 304 - protein, 958 aa, Homo sapiens [sequence omitted]

SEQ ID NO: 305 - DNA, 5065 bp, Homo sapiens
cgctcgatcttgggacccaccgctgccctcagctccgagtccagggcgagtgcagagcacagcgggcggaggaccccgggcgcgggcgcggacggcacgcggggcatgaacctggagggcggcggccgaggcggagagttcggcatgagcgcggtgagctgcggcaacgggaagctccgccagtggctgatcgaccagatcgacagcggcaagtaccccgggctggtgtgggagaacgaggagaagagcatcttccgcatcccctggaagcacgcgggcaagcaggactacaaccgcgaggaggacgccgcgctcttcaaggcttgggcactgtttaaaggaaagttccgagaaggcatcgacaagccggaccctcccacctggaagacgcgcctgcggtgcgctttgaacaagagcaatgactttgaggaactggttgagcggagccagctggacatctcagacccgtacaaagtgtacaggattgttcctgagggagccaaaaaaggagccaagcagctcaccctggaggacccgcagatgtccatgagccacccctacaccatgacaacgccttacccttcgctcccagcccagcaggttcacaactacatgatgccacccctcgaccgaagctggagggactacgtcccggatcagccacacccggaaatcccgtaccaatgtcccatgacgtttggaccccgcggccaccactggcaaggcccagcttgtgaaaatggttgccaggtgacaggaaccttttatgcttgtgccccacctgagtcccaggctcccggagtccccacagagccaagcataaggtctgccgaagccttggcgttctcagactgccggctgcacatctgcctgtactaccgggaaatcctcgtgaaggagctgaccacgtccagccccgagggctgccggatctcccatggacatacgtatgacgccagcaacctggaccaggtcctgttcccctacccagaggacaatggccacaggaaaaacattgagaacctgctgagccacctggagaggggcgtggtcctctggatggcccccgacgggctctatgcgaaaagactgtgccagagcacgatctactgggacgggcccctggcgctgtgcaacgaccggcccaacaaactggagagagaccagacctgcaagctctttgacacacagcagttcttgtcagagctgcaagcgtttgctcaccacggccgctccctgccaagattccaggtgactctatgctttggagaggagtttccagaccctcagaggcaaagaaagctcatcacagctcacgtagaacctctgctagccagacaactatattattttgctcaacaaaacagtggacatttcctgaggggctacgatttaccagaacacatcagcaatccagaagattaccacagatctatccgccattcctctattcaagaatgaaaaatgtcaagatgagtggttttctttttccttttttttttttttttttttgatacggagatacggggtcttgctctgtctcccaggctggagtgcagtgacacaatctcagctcactgtgacctccgcctcctgggttcaagagactctcctgcctcagcctccctggtagctgggattacaggtgtgagccactgcacccacccaagacaagtgattttcattgtaaatatttgactttagtgaaagcgtccaattgactgccctcttactgttttgaggaactcagaagtggagatttcagttcagcggttgaggagaattgcggcgagacaagcatggaaaatcagtgacatctgattggcagatgagcttatttcaaaaggaagggtggctttgcattttcttgtgttctgtagactgccatcattgatgatcactgtgaaaattgaccaagtgatgtgtttacatttactgaaatgcgctctttaatttgttgtagattaggtcttgctggaagacagagaaaacttgcctttcagtattgacactgactagagtgatgactgcttgtaggtatgtctgtgccatttctcagggaagtaagatgtaaattgaagaagcctcacacgtaaaagaaatgtattaatgtatgtaggagctgcagttcttgtggaagacacttgctgagtgaaggaaatgaatctttgactgaagccgtgcctgtagccttggggaggcccatcccccacctgccagcggtttcctggtgtgggtccctctgccccaccctccttcccattggctttctctccttggcctttcctggaagccagttagtaaacttcctattttcttgagtcaaaaaacatgagcgctactcttggatgggacatttttgtctgtcctacaatctagtaatgtctaagtaatggttaagttttcttgtttctgcatctttttgaccctcattctttagagatgctaaaattcttcgcataaagaagaagaaattaaggaacataaatcttaatacttgaactgttgcccttctgtccaagtacttaactatctgttcccttcctctgtgccacgctcctctgtttgtttggctgtccagcgatcagccatggcgacactaaaggaggaggagccggggactcccaggctggagagcactgccaggacccaccactggaagcaggatggagctgactacggaactgcacactcagtgggctgtttctgcttatttcatctgttctatgcttcctcgtgccaattatagtttgacagggccttaaaattacttggctttttccaaatgcttctatttatagaaatcccaaagacctccacttgcttaagtatacctatcacttacatttttgtggttttgagaaagtacagcagtagactggggcgtcacctccaggccgtttctcatactacaggatatttactattactcccaggattcagcagaagattgcgttagctctcaaatgtgtgttcctgcttttctaatggatattttaaattcattcaacaagcacctagtaagtgcctgctgtatccctacattacacagttcagcctttatcaagcttagtgagcagtgagcactgaaacattattttttaatgtttaaaaagtttctaatattaaagtcagaatattaatacaattaatattaatattaactacagaaaagacaaacagtagagaacagcaaaaaaataaaaaggatctccttttttcccagcccaaattctcctctctaaaagtgtccacaagaaggggtgtttattcttccaacacatttcacttttctgtaaatatacataaacttaaaaagaaaacctcatggagtcatcttgcacacacttttcatgcagtgctctttgtagctaaacagtgaagatttacctcgttctgctcagaggccttgctgtggagctccactgccatgtacccagtagggtttgacatttcattagccatgcaacatggatatgtattgggcagcagactgtgtttcgtgaactgcagtgatgtatacatcttatagatgcaaagtattttggggtatattatcctaagggaagataaagatgatattaagaactgctgtttcacggggcccttacctgtgaccctctttgctgaagaatatttaaccccacacagcacttcaaagaagctgtcttggaagtctgtctcaggagcaccctgtcttcttaattctccaagcggatgctccatttcaattgctttgtgacttcttcttctttgtttttttaaatattatgctgctttaacagtggagctgaattttctggaaaatgcttcttggctggggccactacctcctttcctatctttacatctatgtgtatgttgactttttaaaattctgagtgatccagggtatgacctagggaatgaactagctatggaaataactcagggttaggaatcctagcacttgtctcaggactctgaaaaggaacggcttcctcattccttgtcttgataaagtggaattggcaaactagaatttagtttgtactcagtggacagtgctgttgaagatttgaggacttgttaaagagcactgggtcatatggaaaaaatgtatgtgtctccccaggtgcattttcttggtttatgtcttgttcttgagattttgtatatttaggaaaacctcaagcagtaattaatatctcctggaacactatagagaaccaagtgaccgactcatttacaactgaaacctaggaagcccctgagtcctgagcgaaaacaggagagttagtcgccctacagaaaacccagctagactattgggtatgaactaaaaagagactgtgccatggtgagaaaaatgtaaaatcctacagtggaatgagcagcccttacagtgttgttaccaccaagggcaggtaggtattagtgtttgaaaaagctggtctttgagcgagggcataaatacagctagccccaggggtggaacaactgtgggagtcttgggtactcgcacctcttggctttgttgatgctccgccaggaaggccacttgtgtgtgcgtgtcagttacttttttagtaacaattcagatccagtgtaaacttccgttcattgctctccagtcacatgcccccacttccccacaggtgaaagtttttctgaagtgttgggattggttaaggtctttatttgtattacgtatctccccaagtcctctgtggccagctgcatctgtctgaatggtgcgtgaaggctctcagaccttacacaccattttgtaagttatgttttacatgccccgtttttgagactgatctcgatgcaggtggatctccttgagatcctgatagcctgttacaggaatgaagtaaaggtcagttttttttgtattgattttcacagctttgaggaacatgcataagaaatgtagctgaagtagaggggacgtgagagaagggccaggccggcaggccaaccctcctccaatggaaattcccgtgttgcttcaaactgagacagatgggacttaacaggcaatggggtccacttccccctcttcagcatcccccgtacc

SEQ ID NO: 306 - protein, 451 aa, Homo sapiens
MNLEGGGRGGEFGMSAVSCGNGKLRQWLIDQIDSGKYPGLVWENEEKSIFRIPWKHAGKQDYNREEDAALFKAWALFKGKFREGIDKPDPPTWKTRLRCALNKSNDFEELVERSQLDISDPYKVYRIVPEGAKKGAKQLTLEDPQMSMSHPYTMTTPYPSLPAQQVHNYMMPPLDRSWRDYVPDQPHPEIPYQCPMTFGPRGHHWQGPACENGCQVTGTFYACAPPESQAPGVPTEPSIRSAEALAFSDCRLHICLYYREILVKELTTSSPEGCRISHGHTYDASNLDQVLFPYPEDNGHRKNIENLLSHLERGVVLWMAPDGLYAKRLCQSTIYWDGPLALCNDRPNKLERDQTCKLFDTQQFLSELQAFAHHGRSLPRFQVTLCFGEEFPDPQRQRKLITAHVEPLLARQLYYFAQQNSGHFLRGYDLPEHISNPEDYHRSIRHSSIQE

SEQ ID NO: 307 - DNA, 1453 bp, Homo sapiens
ggccacgaaggccggcccccaccccgggacccccgccgtccccgggccggccggccggtgggcacgatgagccaggtgctggggaagccgcagccgcaggacgaggacgacgcggaggaggaggaggaggaggatgagctggtggggctagcggactacggagacgggcccgactcctccgacgccgatccggacagcggcacagaggagggagttctggacttcagtgaccccttcagcactgaagtgaagccgagaatcctgctcatgggcctgaggagaagcggcaagtcgtctattcagaaagttgtctttcacaaaatgtctcccaacgaaactctgttcttggagagcactaataagatatgccgggaagatgtttccaacagctcctttgtcaattttcagatttgggacttcccaggacagattgacttttttgaccctacatttgactatgagatgatcttccggggaacaggagcactgatatttgtcattgactcacaggatgattacatggaagccctggccaggctccacctcacggtgaccagggcctacaaagtgaatactgacatcaacttcgaggtgtttattcataaagtggatggtctgtcagatgaccacaaaattgaaacccaaagagatattcaccagagggcaaacgatgaccttgcagatgctggattagaaaaaattcacctcagcttttatctgacaagcatatatgatcattcaatatttgaagcttttagcaaagttgttcagaaactgattccacaactcccaactctggagaatttgctgaacatctttatctcaaattctggaattgaaaaggcatttctatttgatgtggtcagtaaaatttatattgcaactgatagtactccggtggatatgcaaacctatgagctctgctgtgatatgatagatgtggttattgacatctcttgtatttatggtctcaaagaagatggagcaggaaccccctatgacaaggaatccacagccatcataaagcttaataatacaaccgtgctttatttaaaagaggtgacaaagttcctggctctcgtttgctttgtcagagaggaaagctttgaaagaaaagggctaattgactataattttcattgcttccggaaggccattcatgaagtttttgaggtgagaatgaaagtagtaaaatctcgaaaggttcagaatcggctgcagaagaaaaagagagccacccctaatgggacccctagagtgctgctgtaggtgaggtttcaggaatgtcttttgaaatcagaccttatccatgaggctgctgcgccatgttgcactaaaggaagaggaagaaggagattgggacacataccattgatttgttgttaaaaaaaaaaaaattcctgcaaccctcttgatcttctcttttataattaaagtcagcacttgaagcggg

SEQ ID NO: 308 - protein, 400 aa, Homo sapiens
MSQVLGKPQPQDEDDAEEEEEEDELVGLADYGDGPDSSDADPDSGTEEGVLDFSDPFSTEVKPRILLMGLRRSGKSSIQKVVFHKMSPNETLFLESTNKICREDVSNSSFVNFQIWDFPGQIDFFDPTFDYEMIFRGTGALIFVIDSQDDYMEALARLHLTVTRAYKVNTDINFEVFIHKVDGLSDDHKIETQRDIHQRANDDLADAGLEKIHLSFYLTSIYDHSIFEAFSKVVQKLIPQLPTLENLLNIFISNSGIEKAFLFDVVSKIYIATDSTPVDMQTYELCCDMIDVVIDISCIYGLKEDGAGTPYDKESTAIIKLNNTTVLYLKEVTKFLALVCFVREESFERKGLIDYNFHCFRKAIHEVFEVRMKVVKSRKVQNRLQKKKRATPNGTPRVLL

SEQ ID NO: 309 - DNA, 2414 bp, Homo sapiens
cccgcgtgcatacggttgccggcatggcacattacaacttcaagaaaattacggtggtgccgtccgccaaggacttcatagacctcacgttgtcgaagactcaacgaaagactccaaccgttattcataaacattaccaaatacatcgcattagacatttttacatgagaaaagtcaaatttactcaacagaattaccatgatagactttcacaaattctaacagatttccccaaattggatgatattcatccgttctatgctgatttgatgaatattctctacgacaaggatcattacaagttggctctggggcaaataaatattgccaaaaatttagtggacaatgttgctaaagattatgtgcgactgatgaagtatggcgactctctctaccgctgcaaacagctgaagcgtgcggccctgggacggatgtgcacagtgatcaagaggcagaagcagagtttggagtatttggagcaagtgcgtcagcatttatcccgtttgccaaccattgatccgaataccaggaccctgcttttgtgtgggtacccaaatgttgggaagtccagcttcatcaacaaggtgacgagagcagacgtggatgtccagccctatgcgttcacaaccaagtctctgtttgttgggcacatggattataagtatctacgttggcaggttgtagacactcctgggatcctggaccaccctctggaggataggaacaccatcgagatgcaggccatcactgccctggcccacctccgtgctgcggtcctgtatgtgatggatttgtctgagcagtgtgggcatgggctgagggagcagctagaactcttccagaacatcagacctctcttcatcaacaagcctctcatagttgtagccaacaaatgtgatgtgaagagaatagctgaactttctgaagatgatcagaaaatatttacagatttgcagtctgaaggattccctgtaatagagaccagcaccctgactgaggaaggtgttattaaagttaaaacagaggcttgcgataggcttttggctcatcgagtggaaaccaaaatgaagggaaataaagtgaatgaggtgctgaatagactgcacctggctatcccaaccaggagggacgataaggagaggccccctttcatccctgaaggagtggtggctcgcaggaagaggatggaaactgaggagtccaggaagaagagggaacgagatcttgagctggaaatgggagatgattatattttggatcttcagaagtactgggatttaatgaatttgtctgaaaaacatgataagataccagaaatctgggaaggccataatatagctgattatattgatccagccatcatgaagaaattggaagaattagaaaaagaagaagagctgagaacagctgctggagagtatgacagtgtatctgagagtgaagacgaagagatgctggaaatccgacagctggcaaagcaaattcgagagaaaaagaagttgaaaattctggagtccaaagaaaagaatacacagggacccaggatgccgcgaactgctaagaaggttcagaggacagttttggagaaggagatgcgtagtcttggtgttgacatggacgataaagacgatgcccattacgcagtccaggcaagaagatcccggagcatcactaggaaaagaaagcgggaagactctgctcccccgtcctctgtggcccggagtgggagttgctctcgaactccacgtgacgtttctggtcttagggatgtcaagatggtgaagaaagccaagactatgaagaatgctcagaagaagatgaatcggttggggaagaaaggggaggcggatagacacgtgtttgatatgaagcccaagcacttgctgtctgggaagaggaaagctggtaaaaaggacaggagatagtatccgtttggttggcgtggcttcgctagagtgttgctgtttatttcctggtttggtacagtatggtttcatgaaattggagctctgtacaaactgaaaaagacaaaataagtaaagcacttgttgctttgctgaaaactatggttaaccctatataggtgtgggaaatttttgtcactgcataatattacaaatattttgagtagacagtgtttccacatttaatggagtatcagttgcttcagattttcagaactgggaagatttactggtgtaactgggttgtttttgatggagaaaaaccttattttcttttgtaagagctgggagcaaacacgtttatgagtgtgtcggaatcccgtgcttaaaatacgctcttaaattattttctagtcttattttacaatgtctcattgtagtctgtcttcaactattttatccaaaataaacctccagaagaaactaaaaaaaaaaaaaaaaaaaaaaaaa

SEQ ID NO: 310 - protein, 633 aa, Homo sapiens
MAHYNFKKITVVPSAKDFIDLTLSKTQRKTPTVIHKHYQIHRIRHFYMRKVKFTQQNYHDRLSQILTDFPKLDDIHPFYADLMNILYDKDHYKLALGQINIAKNLVDNVAKDYVRLMKYGDSLYRCKQLKRAALGRMCTVIKRQKQSLEYLEQVRQHLSRLPTIDPNTRTLLLCGYPNVGKSSFINKVTRADVDVQPYAFTTKSLFVGHMDYKYLRWQVVDTPGILDHPLEDRNTIEMQAITALAHLRAAVLYVMDLSEQCGHGLREQLELFQNIRPLFINKPLIVVANKCDVKRIAELSEDDQKIFTDLQSEGFPVIETSTLTEEGVIKVKTEACDRLLAHRVETKMKGNKVNEVLNRLHLAIPTRRDDKERPPFIPEGVVARRKRMETEESRKKRERDLELEMGDDYILDLQKYWDLMNLSEKHDKIPEIWEGHNIADYIDPAIMKKLEELEKEEELRTAAGEYDSVSESEDEEMLEIRQLAKQIREKKKLKILESKEKNTQGPRMPRTAKKVQRTVLEKEMRSLGVDMDDKDDAHYAVQARRSRSITRKRKREDSAPPSSVARSGSCSRTPRDVSGLRDVKMVKKAKTMKNAQKKMNRLGKKGEADRHVFDMKPKHLLSGKRKAGKKDRR

SEQ ID NO: 311 - DNA, 13993 bp, Homo sapiens
tcctggcatcagttactgtgttgactcactcagtgttgggatcactcactttccccctacaggactcagatctgggaggcaattaccttcggagaaaaacgaataggaaaaactgaagtgttactttttttaaagctgctgaagtttgttggtttctcattgtttttaagcctactggagcaataaagtttgaagaacttttaccaggttttttttatcgctgccttgatatacacttttcaaaatgctttggtgggaagaagtagaggactgttatgaaagagaagatgttcaaaagaaaacattcacaaaatgggtaaatgcacaattttctaagtttgggaagcagcatattgagaacctcttcagtgacctacaggatgggaggcgcctcctagacctcctcgaaggcctgacagggcaaaaactgccaaaagaaaaaggatccacaagagttcatgccctgaacaatgtcaacaaggcactgcgggttttgcagaacaataatgttgatttagtgaatattggaagtactgacatcgtagatggaaatcataaactgactcttggtttgatttggaatataatcctccactggcaggtcaaaaatgtaatgaaaaatatcatggctggattgcaacaaaccaacagtgaaaagattctcctgagctgggtccgacaatcaactcgtaattatccacaggttaatgtaatcaacttcaccaccagctggtctgatggcctggctttgaatgctctcatccatagtcataggccagacctatttgactggaatagtgtggtttgccagcagtcagccacacaacgactggaacatgcattcaacatcgccagatatcaattaggcatagagaaactactcgatcctgaagatgttgataccacctatccagataagaagtccatcttaatgtacatcacatcactcttccaagttttgcctcaacaagtgagcattgaagccatccaggaagtggaaatgttgccaaggccacctaaagtgactaaagaagaacattttcagttacatcatcaaatgcactattctcaacagatcacggtcagtctagcacagggatatgagagaacttcttcccctaagcctcgattcaagagctatgcctacacacaggctgcttatgtcaccacctctgaccctacacggagcccatttccttcacagcatttggaagctcctgaagacaagtcatttggcagttcattgatggagagtgaagtaaacctggaccgttatcaaacagctttagaagaagtattatcgtggcttctttctgctgaggacacattgcaagcacaaggagagatttctaatgatgtggaagtggtgaaagaccagtttcatactcatgaggggtacatgatggatttgacagcccatcagggccgggttggtaatattctacaattgggaagtaagctgattggaacaggaaaattatcagaagatgaagaaactgaagtacaagagcagatgaatctcctaaattcaagatgggaatgcctcagggtagctagcatggaaaaacaaagcaatttacatagagttttaatggatctccagaatcagaaactgaaagagttgaatgactggctaacaaaaacagaagaaagaacaaggaaaatggaggaagagcctcttggacctgatcttgaagacctaaaacgccaagtacaacaacataaggtgcttcaagaagatctagaacaagaacaagtcagggtcaattctctcactcacatggtggtggtagttgatgaatctagtggagatcacgcaactgctgctttggaagaacaacttaaggtattgggagatcgatgggcaaacatctgtagatggacagaagaccgctgggttcttttacaagacatccttctcaaatggcaacgtcttactgaagaacagtgcctttttagtgcatggctttcagaaaaagaagatgcagtgaacaagattcacacaactggctttaaagatcaaaatgaaatgttatcaagtcttcaaaaactggccgttttaaaagcggatctagaaaagaaaaagcaatccatgggcaaactgtattcactcaaacaagatcttctttcaacactgaagaataagtcagtgacccagaagacggaagcatggctggataactttgcccggtgttgggataatttagtccaaaaacttgaaaagagtacagcacagatttcacaggctgtcaccaccactcagccatcactaacacagacaactgtaatggaaacagtaactacggtgaccacaagggaacagatcctggtaaagcatgctcaagaggaacttccaccaccacctccccaaaagaagaggcagattactgtggattctgaaattaggaaaaggttggatgttgatataactgaacttcacagctggattactcgctcagaagctgtgttgcagagtcctgaatttgcaatctttcggaaggaaggcaacttctcagacttaaaagaaaaagtcaatgccatagagcgagaaaaagctgagaagttcagaaaactgcaagatgccagcagatcagctcaggccctggtggaacagatggtgaatgagggtgttaatgcagatagcatcaaacaagcctcagaacaactgaacagccggtggatcgaattctgccagttgctaagtgagagacttaactggctggagtatcagaacaacatcatcgctttctataatcagctacaacaattggagcagatgacaactactgctgaaaactggttgaaaatccaacccaccaccccatcagagccaacagcaattaaaagtcagttaaaaatttgtaaggatgaagtcaaccggctatcaggtcttcaacctcaaattgaacgattaaaaattcaaagcatagccctgaaagagaaaggacaaggacccatgttcctggatgcagactttgtggcctttacaaatcattttaagcaagtcttttctgatgtgcaggccagagagaaagagctacagacaatttttgacactttgccaccaatgcgctatcaggagaccatgagtgccatcaggacatgggtccagcagtcagaaaccaaactctccatacctcaacttagtgtcaccgactatgaaatcatggagcagagactcggggaattgcaggctttacaaagttctctgcaagagcaacaaagtggcctatactatctcagcaccactgtgaaagagatgtcgaagaaagcgccctctgaaattagccggaaatatcaatcagaatttgaagaaattgagggacgctggaagaagctctcctcccagctggttgagcattgtcaaaagctagaggagcaaatgaataaactccgaaaaattcagaatcacatacaaaccctgaagaaatggatggctgaagttgatgtttttctgaaggaggaatggcctgcccttggggattcagaaattctaaaaaagcagctgaaacagtgcagacttttagtcagtgatattcagacaattcagcccagtctaaacagtgtcaatgaaggtgggcagaagataaagaatgaagcagagccagagtttgcttcgagacttgagacagaactcaaagaacttaacactcagtgggatcacatgtgccaacaggtctatgccagaaaggaggccttgaagggaggtttggagaaaactgtaagcctccagaaagatctatcagagatgcacgaatggatgacacaagctgaagaagagtatcttgagagagattttgaatataaaactccagatgaattacagaaagcagttgaagagatgaagagagctaaagaagaggcccaacaaaaagaagcgaaagtgaaactccttactgagtctgtaaatagtgtcatagctcaagctccacctgtagcacaagaggccttaaaaaaggaacttgaaactctaaccaccaactaccagtggctctgcactaggctgaatgggaaatgcaagactttggaagaagtttgggcatgttggcatgagttattgtcatacttggagaaagcaaacaagtggctaaatgaagtagaatttaaacttaaaaccactgaaaacattcctggcggagctgaggaaatctctgaggtgctagattcacttgaaaatttgatgcgacattcagaggataacccaaatcagattcgcatattggcacagaccctaacagatggcggagtcatggatgagctaatcaatgaggaacttgagacatttaattctcgttggagggaactacatgaagaggctgtaaggaggcaaaagttgcttgaacagagcatccagtctgcccaggagactgaaaaatccttacacttaatccaggagtccctcacattcattgacaagcagttggcagcttatattgcagacaaggtggacgcagctcaaatgcctcaggaagcccagaaaatccaatctgatttgacaagtcatgagatcagtttagaagaaatgaagaaacataatcaggggaaggaggctgcccaaagagtcctgtctcagattgatgttgcacagaaaaaattacaagatgtctccatgaagtttcgattattccagaaaccagccaattttgagcagcgtctacaagaaagtaagatgattttagatgaagtgaagatgcacttgcctgcattggaaacaaagagtgtggaacaggaagtagtacagtcacagctaaatcattgtgtgaacttgtataaaagtctgagtgaagtgaagtctgaagtggaaatggtgataaagactggacgtcagattgtacagaaaaagcagacggaaaatcccaaagaacttgatgaaagagtaacagctttgaaattgcattataatgagctgggagcaaaggtaacagaaagaaagcaacagttggagaaatgcttgaaattgtcccgtaagatgcgaaaggaaatgaatgtcttgacagaatggctggcagctacagatatggaattgacaaagagatcagcagttgaaggaatgcctagtaatttggattctgaagttgcctggggaaaggctactcaaaaagagattgagaaacagaaggtgcacctgaagagtatcacagaggtaggagaggccttgaaaacagttttgggcaagaaggagacgttggtggaagataaactcagtcttctgaatagtaactggatagctgtcacctcccgagcagaagagtggttaaatcttttgttggaataccagaaacacatggaaacttttgaccagaatgtggaccacatcacaaagtggatcattcaggctgacacacttttggatgaatcagagaaaaagaaaccccagcaaaaagaagacgtgcttaagcgtttaaaggcagaactgaatgacatacgcccaaaggtggactctacacgtgaccaagcagcaaacttgatggcaaaccgcggtgaccactgcaggaaattagtagagccccaaatctcagagctcaaccatcgatttgcagccatttcacacagaattaagactggaaaggcctccattcctttgaaggaattggagcagtttaactcagatatacaaaaattgcttgaaccactggaggctgaaattcagcagggggtgaatctgaaagaggaagacttcaataaagatatgaatgaagacaatgagggtactgtaaaagaattgttgcaaagaggagacaacttacaacaaagaatcacagatgagagaaagcgagaggaaataaagataaaacagcagctgttacagacaaaacataatgctctcaaggatttgaggtctcaaagaagaaaaaaggctctagaaatttctcatcagtggtatcagtacaagaggcaggctgatgatctcctgaaatgcttggatgacattgaaaaaaaattagccagcctacctgagcccagagatgaaaggaaaataaaggaaattgatcgggaattgcagaagaagaaagaggagctgaatgcagtgcgtaggcaagctgagggcttgtctgaggatggggccgcaatggcagtggagccaactcagatccagctcagcaagcgctggcgggaaattgagagcaaatttgctcagtttcgaagactcaactttgcacaaattcacactgtccgtgaagaaacgatgatggtgatgactgaagacatgcctttggaaatttcttatgtgccttctacttatttgactgaaatcactcatgtctcacaagccctattagaagtggaacaacttctcaatgctcctgacctctgtgctaaggactttgaagatctctttaagcaagaggagtctctgaagaatataaaagatagtctacaacaaagctcaggtcggattgacattattcatagcaagaagacagcagcattgcaaagtgcaacgcctgtggaaagggtgaagctacaggaagctctctcccagcttgatttccaatgggaaaaagttaacaaaatgtacaaggaccgacaagggcgatttgacagatctgttgagaaatggcggcgttttcattatgatataaagatatttaatcagtggctaacagaagctgaacagtttctcagaaagacacaaattcctgagaattgggaacatgctaaatacaaatggtatcttaaggaactccaggatggcattgggcagcggcaaactgttgtcagaacattgaatgcaactggggaagaaataattcagcaatcctcaaaaacagatgccagtattctacaggaaaaattgggaagcctgaatctgcggtggcaggaggtctgcaaacagctgtcagacagaaaaaagaggctagaagaacaaaagaatatcttgtcagaatttcaaagagatttaaatgaatttgttttatggttggaggaagcagataacattgctagtatcccacttgaacctggaaaagagcagcaactaaaagaaaagcttgagcaagtcaagttactggtggaagagttgcccctgcgccagggaattctcaaacaattaaatgaaactggaggacccgtgcttgtaagtgctcccataagcccagaagagcaagataaacttgaaaataagctcaagcagacaaatctccagtggataaaggtttccagagctttacctgagaaacaaggagaaattgaagctcaaataaaagaccttgggcagcttgaaaaaaagcttgaagaccttgaagagcagttaaatcatctgctgctgtggttatctcctattaggaatcagttggaaatttataaccaaccaaaccaagaaggaccatttgacgttcaggaaactgaaatagcagttcaagctaaacaaccggatgtggaagagattttgtctaaagggcagcatttgtacaaggaaaaaccagccactcagccagtgaagaggaagttagaagatctgagctctgagtggaaggcggtaaaccgtttacttcaagagctgagggcaaagcagcctgacctagctcctggactgaccactattggagcctctcctactcagactgttactctggtgacacaacctgtggttactaaggaaactgccatctccaaactagaaatgccatcttccttgatgttggaggtacctgctctggcagatttcaaccgggcttggacagaacttaccgactggctttctctgcttgatcaagttataaaatcacagagggtgatggtgggtgaccttgaggatatcaacgagatgatcatcaagcagaaggcaacaatgcaggatttggaacagaggcgtccccagttggaagaactcattaccgctgcccaaaatttgaaaaacaagaccagcaatcaagaggctagaacaatcattacggatcgaattgaaagaattcagaatcagtgggatgaagtacaagaacaccttcagaaccggaggcaacagttgaatgaaatgttaaaggattcaacacaatggctggaagctaaggaagaagctgagcaggtcttaggacaggccagagccaagcttgagtcatggaaggagggtccctatacagtagatgcaatccaaaagaaaatcacagaaaccaagcagttggccaaagacctccgccagtggcagacaaatgtagatgtggcaaatgacttggccctgaaacttctccgggattattctgcagatgataccagaaaagtccacatgataacagagaatatcaatgcctcttggagaagcattcataaaagggtgagtgagcgagaggctgctttggaagaaactcatagattactgcaacagttccccctggacctggaaaagtttcttgcctggcttacagaagctgaaacaactgccaatgtcctacaggatgctacccgtaaggaaaggctcctagaagactccaagggagtaaaagagctgatgaaacaatggcaagacctccaaggtgaaattgaagctcacacagatgtttatcacaacctggatgaaaacagccaaaaaatcctgagatccctggaaggttccgatgatgcagtcctgttacaaagacgtttggataacatgaacttcaagtggagtgaacttcggaaaaagtctctcaacattaggtcccatttggaagccagttctgaccagtggaagcgtctgcacctttctctgcaggaacttctggtgtggctacagctgaaagatgatgaattaagccggcaggcacctattggaggcgactttccagcagttcagaagcagaacgatgtacatagggccttcaagagggaattgaaaactaaagaacctgtaatcatgagtactcttgagactgtacgaatatttctgacagagcagcctttggaaggactagagaaactctaccaggagcccagagagctgcctcctgaggagagagcccagaatgtcactcggcttctacgaaagcaggctgaggaggtcaatactgagtgggaaaaattgaacctgcactccgctgactggcagagaaaaatagatgagacccttgaaagactccaggaacttcaagaggccacggatgagctggacctcaagctgcgccaagctgaggtgatcaagggatcctggcagcccgtgggcgatctcctcattgactctctccaagatcacctcgagaaagtcaaggcacttcgaggagaaattgcgcctctgaaagagaacgtgagccacgtcaatgaccttgctcgccagcttaccactttgggcattcagctctcaccgtataacctcagcactctggaagacctgaacaccagatggaagcttctgcaggtggccgtcgaggaccgagtcaggcagctgcatgaagcccacagggactttggtccagcatctcagcactttctttccacgtctgtccagggtccctgggagagagccatctcgccaaacaaagtgccctactatatcaaccacgagactcaaacaacttgctgggaccatcccaaaatgacagagctctaccagtctttagctgacctgaataatgtcagattctcagcttataggactgccatgaaactccgaagactgcagaaggccctttgcttggatctcttgagcctgtcagctgcatgtgatgccttggaccagcacaacctcaagcaaaatgaccagcccatggatatcctgcagattattaattgtttgaccactatttatgaccgcctggagcaagagcacaacaatttggtcaacgtccctctctgcgtggatatgtgtctgaactggctgctgaatgtttatgatacgggacgaacagggaggatccgtgtcctgtcttttaaaactggcatcatttccctgtgtaaagcacatttggaagacaagtacagataccttttcaagcaagtggcaagttcaacaggattttgtgaccagcgcaggctgggcctccttctgcatgattctatccaaattccaagacagttgggtgaagttgcatcctttgggggcagtaacattgagccaagtgtccggagctgcttccaatttgctaataataagccagagatcgaagcggccctcttcctagactggatgagactggaaccccagtccatggtgtggctgcccgtcctgcacagagtggctgctgcagaaactgccaagcatcaggccaaatgtaacatctgcaaagagtgtccaatcattggattcaggtacaggagtctaaagcactttaattatgacatctgccaaagctgctttttttctggtcgagttgcaaaaggccataaaatgcactatcccatggtggaatattgcactccgactacatcaggagaagatgttcgagactttgccaaggtactaaaaaacaaatttcgaaccaaaaggtattttgcgaagcatccccgaatgggctacctgccagtgcagactgtcttagagggggacaacatggaaactcccgttactctgatcaacttctggccagtagattctgcgcctgcctcgtcccctcagctttcacacgatgatactcattcacgcattgaacattatgctagcaggctagcagaaatggaaaacagcaatggatcttatctaaatgatagcatctctcctaatgagagcatagatgatgaacatttgttaatccagcattactgccaaagtttgaaccaggactcccccctgagccagcctcgtagtcctgcccagatcttgatttccttagagagtgaggaaagaggggagctagagagaatcctagcagatcttgaggaagaaaacaggaatctgcaagcagaatatgaccgtctaaagcagcagcacgaacataaaggcctgtccccactgccgtcccctcctgaaatgatgcccacctctccccagagtccccgggatgctgagctcattgctgaggccaagctactgcgtcaacacaaaggccgcctggaagccaggatgcaaatcctggaagaccacaataaacagctggagtcacagttacacaggctaaggcagctgctggagcaaccccaggcagaggccaaagtgaatggcacaacggtgtcctctccttctacctctctacagaggtccgacagcagtcagcctatgctgctccgagtggttggcagtcaaacttcggactccatgggtgaggaagatcttctcagtcctccccaggacacaagcacagggttagaggaggtgatggagcaactcaacaactccttccctagttcaagaggaagaaatacccctggaaagccaatgagagaggacacaatgtaggaagtcttttccacatggcagatgatttgggcagagcgatggagtccttagtatcagtcatgacagatgaagaaggagcagaataaatgttttacaactcctgattcccgcatggtttttataatattcatacaacaaagaggattagacagtaagagtttacaagaaataaatctatatttttgtgaagggtagtggtattatactgtagatttcagtagtttctaagtctgttattgttttgttaacaatggcaggttttacacgtctatgcaattgtacaaaaaagttataagaaaactacatgtaaaatcttgatagctaaataacttgccatttctttatatggaacgcattttgggttgtttaaaaatttataacagttataaagaaagattgtaaactaaagtgtgctttataaaaaaaagttgtttataaaaacccctaaaaacaaaacaaacacacacacacacacatacacacacacacacaaaactttgaggcagcgcattgttttgcatccttttggcgtgatatccatatgaaattcatggctttttctttttttgcatattaaagataagacttcctctaccaccacaccaaatgactactacacactgctcatttgagaactgtcagctgagtggggcaggcttgagttttcatttcatatatctatatgtctataagtatataaatactatagttatatagataaagagatacgaatttctatagactgactttttccattttttaaatgttcatgtcacatcctaatagaaagaaattacttctagtcagtcatccaggcttacctgcttggtctagaatggatttttcccggagccggaagccaggaggaaactacaccacactaaaacattgtctacagctccagatgtttctcattttaaacaactttccactgacaacgaaagtaaagtaaagtattggatttttttaaagggaacatgtgaatgaatacacaggacttattatatcagagtgagtaatcggttggttggttgattgattgattgattgatacattcagcttcctgctgctagcaatgccacgatttagatttaatgatgcttcagtggaaatcaatcagaaggtattctgaccttgtgaacatcagaaggtattttttaactcccaagcagtagcaggacgatgatagggctggagggctatggattcccagcccatccctgtgaaggagtaggccactctttaagtgaaggattggatgattgttcataatacataaagttctctgtaattacaactaaattattatgccctcttctcacagtcaaaaggaactgggtggtttggtttttgttgcttttttagatttattgtcccatgtgggatgagtttttaaatgccacaagacataatttaaaataaataaactttgggaaaaggtgtaagacagtagccccatcacatttgtgatactgacaggtatcaacccagaagcccatgaactgtgtttccatcctttgcatttctctgcgagtagttccacacaggtttgtaagtaagtaagaaagaaggcaaattgattcaaatgttacaaaaaaacccttcttggtggattagacaggttaaatatataaacaaacaaacaaaaattgctcaaaaaagaggagaaaagctcaagaggaaaagctaaggactggtaggaaaaagctttactctttcatgccattttatttctttttgatttttaaatcattcattcaatagataccaccgtgtgacctataattttgcaaatctgttacctctgacatcaagtgtaattagcttttggagagtgggctgacatcaagtgtaattagcttttggagagtgggttttgtccattattaataattaattaattaacatcaaacacggcttctcatgctatttctacctcactttggttttggggtgttcctgataattgtgcacacctgagttcacagcttcaccacttgtccattgcgttattttctttttcctttataattctttctttttccttcataattttcaaaagaaaacccaaagctctaaggtaacaaattaccaaattacatgaagatttggtttttgtcttgcatttttttcctttatgtgacgctggaccttttctttacccaaggatttttaaaactcagatttaaaacaaggggttactttacatcctactaagaagtttaagtaagtaagtttcattctaaaatcagaggtaaatagagtgcataaataattttgttttaatctttttgtttttcttttagacacattagctctggagtgagtctgtcataatatttgaacaaaaattgagagctttattgctgcattttaagcataattaatttggacattatttcgtgttgtgttctttataaccaccgagtattaaactgtaaatcataatgtaactgaagcataaacatcacatggcatgttttgtcattgttttcaggtactgagttcttacttgagtatcataatatattgtgttttaacaccaacactgtaacatttacgaattatttttttaaacttcagttttactgcattttcacaacatatcagacttcaccaaatatatgccttactattgtattatagtactgctttactgtgtatctcaataaagcacgcagttatgttac

SEQ ID NO: 312 - protein, 3685 aa, Homo sapiens
MLWWEEVEDCYEREDVQKKTFTKWVNAQFSKFGKQHIENLFSDLQDGRRLLDLLEGLTGQKLPKEKGSTRVHALNNVNKALRVLQNNNVDLVNIGSTDIVDGNHKLTLGLIWNIILHWQVKNVMKNIMAGLQQTNSEKILLSWVRQSTRNYPQVNVINFTTSWSDGLALNALIHSHRPDLFDWNSVVCQQSATQRLEHAFNIARYQLGIEKLLDPEDVDTTYPDKKSILMYITSLFQVLPQQVSIEAIQEVEMLPRPPKVTKEEHFQLHHQMHYSQQITVSLAQGYERTSSPKPRFKSYAYTQAAYVTTSDPTRSPFPSQHLEAPEDKSFGSSLMESEVNLDRYQTALEEVLSWLLSAEDTLQAQGEISNDVEVVKDQFHTHEGYMMDLTAHQGRVGNILQLGSKLIGTGKLSEDEETEVQEQMNLLNSRWECLRVASMEKQSNLHRVLMDLQNQKLKELNDWLTKTEERTRKMEEEPLGPDLEDLKRQVQQHKVLQEDLEQEQVRVNSLTHMVVVVDESSGDHATAALEEQLKVLGDRWANICRWTEDRWVLLQDILLKWQRLTEEQCLFSAWLSEKEDAVNKIHTTGFKDQNEMLSSLQKLAVLKADLEKKKQSMGKLYSLKQDLLSTLKNKSVTQKTEAWLDNFARCWDNLVQKLEKSTAQISQAVTTTQPSLTQTTVMETVTTVTTREQILVKHAQEELPPPPPQKKRQITVDSEIRKRLDVDITELHSWITRSEAVLQSPEFAIFRKEGNFSDLKEKVNAIEREKAEKFRKLQDASRSAQALVEQMVNEGVNADSIKQASEQLNSRWIEFCQLLSERLNWLEYQNNIIAFYNQLQQLEQMTTTAENWLKIQPTTPSEPTAIKSQLKICKDEVNRLSGLQPQIERLKIQSIALKEKGQGPMFLDADFVAFTNHFKQVFSDVQAREKELQTIFDTLPPMRYQETMSAIRTWVQQSETKLSIPQLSVTDYEIMEQRLGELQALQSSLQEQQSGLYYLSTTVKEMSKKAPSEISRKYQSEFEEIEGRWKKLSSQLVEHCQKLEEQMNKLRKIQNHIQTLKKWMAEVDVFLKEEWPALGDSEILKKQLKQCRLLVSDIQTIQPSLNSVNEGGQKIKNEAEPEFASRLETELKELNTQWDHMCQQVYARKEALKGGLEKTVSLQKDLSEMHEWMTQAEEEYLERDFEYKTPDELQKAVEEMKRAKEEAQQKEAKVKLLTESVNSVIAQAPPVAQEALKKELETLTTNYQWLCTRLNGKCKTLEEVWACWHELLSYLEKANKWLNEVEFKLKTTENIPGGAEEISEVLDSLENLMRHSEDNPNQIRILAQTLTDGGVMDELINEELETFNSRWRELHEEAVRRQKLLEQSIQSAQETEKSLHLIQESLTFIDKQLAAYIADKVDAAQMPQEAQKIQSDLTSHEISLEEMKKHNQGKEAAQRVLSQIDVAQKKLQDVSMKFRLFQKPANFEQRLQESKMILDEVKMHLPALETKSVEQEVVQSQLNHCVNLYKSLSEVKSEVEMVIKTGRQIVQKKQTENPKELDERVTALKLHYNELGAKVTERKQQLEKCLKLSRKMRKEMNVLTEWLAATDMELTKRSAVEGMPSNLDSEVAWGKATQKEIEKQKVHLKSITEVGEALKTVLGKKETLVEDKLSLLNSNWIAVTSRAEEWLNLLLEYQKHMETFDQNVDHITKWIIQADTLLDESEKKKPQQKEDVLKRLKAELNDIRPKVDSTRDQAANLMANRGDHCRKLVEPQISELNHRFAAISHRIKTGKASIPLKELEQFNSDIQKLLEPLEAEIQQGVNLKEEDFNKDMNEDNEGTVKELLQRGDNLQQRITDERKREEIKIKQQLLQTKHNALKDLRSQRRKKALEISHQWYQYKRQADDLLKCLDDIEKKLASLPEPRDERKIKEIDRELQKKKEELNAVRRQAEGLSEDGAAMAVEPTQIQLSKRWREIESKFAQFRRLNFAQIHTVREETMMVMTEDMPLEISYVPSTYLTEITHVSQALLEVEQLLNAPDLCAKDFEDLFKQEESLKNIKDSLQQSSGRIDIIHSKKTAALQSATPVERVKLQEALSQLDFQWEKVNKMYKDRQGRFDRSVEKWRRFHYDIKIFNQWLTEAEQFLRKTQIPENWEHAKYKWYLKELQDGIGQRQTVVRTLNATGEEIIQQSSKTDASILQEKLGSLNLRWQEVCKQLSDRKKRLEEQKNILSEFQRDLNEFVLWLEEADNIASIPLEPGKEQQLKEKLEQVKLLVEELPLRQGILKQLNETGGPVLVSAPISPEEQDKLENKLKQTNLQWIKVSRALPEKQGEIEAQIKDLGQLEKKLEDLEEQLNHLLLWLSPIRNQLEIYNQPNQEGPFDVQETEIAVQAKQPDVEEILSKGQHLYKEKPATQPVKRKLEDLSSEWKAVNRLLQELRAKQPDLAPGLTTIGASPTQTVTLVTQPVVTKETAISKLEMPSSLMLEVPALADFNRAWTELTDWLSLLDQVIKSQRVMVGDLEDINEMIIKQKATMQDLEQRRPQLEELITAAQNLKNKTSNQEARTIITDRIERIQNQWDEVQEHLQNRRQQLNEMLKDSTQWLEAKEEAEQVLGQARAKLESWKEGPYTVDAIQKKITETKQLAKDLRQWQTNVDVANDLALKLLRDYSADDTRKVHMITENINASWRSIHKRVSEREAALEETHRLLQQFPLDLEKFLAWLTEAETTANVLQDATRKERLLEDSKGVKELMKQWQDLQGEIEAHTDVYHNLDENSQKILRSLEGSDDAVLLQRRLDNMNFKWSELRKKSLNIRSHLEASSDQWKRLHLSLQELLVWLQLKDDELSRQAPIGGDFPAVQKQNDVHRAFKRELKTKEPVIMSTLETVRIFLTEQPLEGLEKLYQEPRELPPEERAQNVTRLLRKQAEEVNTEWEKLNLHSADWQRKIDETLERLQELQEATDELDLKLRQAEVIKGSWQPVGDLLIDSLQDHLEKVKALRGEIAPLKENVSHVNDLARQLTTLGIQLSPYNLSTLEDLNTRWKLLQVAVEDRVRQLHEAHRDFGPASQHFLSTSVQGPWERAISPNKVPYYINHETQTTCWDHPKMTELYQSLADLNNVRFSAYRTAMKLRRLQKALCLDLLSLSAACDALDQHNLKQNDQPMDILQIINCLTTIYDRLEQEHNNLVNVPLCVDMCLNWLLNVYDTGRTGRIRVLSFKTGIISLCKAHLEDKYRYLFKQVASSTGFCDQRRLGLLLHDSIQIPRQLGEVASFGGSNIEPSVRSCFQFANNKPEIEAALFLDWMRLEPQSMVWLPVLHRVAAAETAKHQAKCNICKECPIIGFRYRSLKHFNYDICQSCFFSGRVAKGHKMHYPMVEYCTPTTSGEDVRDFAKVLKNKFRTKRYFAKHPRMGYLPVQTVLEGDNMETPVTLINFWPVDSAPASSPQLSHDDTHSRIEHYASRLAEMENSNGSYLNDSISPNESIDDEHLLIQHYCQSLNQDSPLSQPRSPAQILISLESEERGELERILADLEEENRNLQAEYDRLKQQHEHKGLSPLPSPPEMMPTSPQSPRDAELIAEAKLLRQHKGRLEARMQILEDHNKQLESQLHRLRQLLEQPQAEAKVNGTTVSSPSTSLQRSDSSQPMLLRVVGSQTSDSMGEEDLLSPPQDTSTGLEEVMEQLNNSFPSSRGRNTPGKPMREDTM

SEQ ID NO: 313 - DNA, 3432 bp, Homo sapiens
  Unsure 2741: Unknown base
ctcgtcatgcgcaatgtggcgctgcggcgggcggcagggcctgtgtgtgctgaggcggctgagcggcggacatgcacaccacagagcgtggcgatggaacagtaaccgggcttgtgagagggctctgcagtataaactaggagacaagatccatggattcaccgtaaaccaggtgacatctgttcccgagctgttcctgactgcagtgaagctcacccatgatgacacaggagccaggtatttacacctggccagagaagacacgaataatctgttcagcgtgcagttccgtaccactcccatggacagtactggtgttcctcacattcttgagcataccgtcctttgtgggtctcaaaaatatccgtgcagaaaccctttcttcaaaatgttgaaccggtccctctccacgttcatgaacgccttcacagctagtgattatactctgtatccattttccacacaaaatcccaaggactttcagaatctcctctcggtgtatttggatgccaccttttccccatgtttacgcgagctggatttctggcaggaaggatggcggctggaacatgagaatccgagcgacccccagacgcccttggtctttaaaggagtcgtctttaatgagatgaagggagcgtttacagacaatgagaggatattctcccagcaccttcagaacagacttcttcccgaccacacgtactcagtggtctccgggggtgacccactgtgcatcccggagcttacatgggagcagcttaagcagtttcatgccactcactatcacccaagcaatgctaggttcttcacgtacggtaattttccattagaacagcatctgaaacaaattcacgaggaagcactgagcaaattccagaaaattgaaccaagcaccgtggtgccagctcagacaccctgggacaagcctagggaattccagataacatgtggcccggattcatttgctacagatccctctaaacaaacaaccgtcagcgttagcttcctcttaccggacatcaccgacacatttgaagccttcacattaagtcttctgtcttcactcttgacttctgggcccaattctcccttttacaaagccttgattgaatctggccttggcacagaattttctcctgatgttggatataatggctacacgagggaggcctactttagtgtcggcctccaagggattgtggagaaagacattgagaccgtcagaagcctcatagacagaacgattgatgaagtagttgagacaaggattgaagatgatcgaattgaggctttacttcataaaattgaaatacagatgaaacatcagtctaccagctttgggctgatgctgacatcatacatagcttcttgctggaaccatgatggggaccctgtggagctcttgaagttgggaaatcagttagctaaattcagacagtgcctgcaggaaaatccaaaatttttgcaagaaaaagtaaaacagtattttaagaataaccagcataagctgactttatcgatgaggccagatgacaagtatcacgagaagcaggcacaggtggaagccacgaagctcaagcagaaggtcgaggctctgtcccccggagacaggcagcagatctacgagaaaggtctagaattacggagtcaacaaagcaaacctcaagatgcctcttgtctgccagcgttgaaagtttccgatattgaacccaccatacctgtcacagagttggacgtggtcctgacagctggagatatccctgttcagtactgcgcccagcccaccaatggcatggtgtatttccgggccttctccagcctgaacacactccccgaggagctgaggccctatgtgcccctcttctgcagcatcctcaccaagctgggctgcggccttcttgactaccgggagcaggctcagcagatagaattgaagaccggagggatgagtgcttctccccacgtgctccccgacgactcacacatggacacctacgagcaggtaggtgtgcttttctcctctctctgcctggatcgaaacctgccagacatgatgcagctatggagtgaaatatttaacaacccgtgctttgaagaagaggagcacttcaaggtgctggtgaagatgaccgcccaggagctcgccaatggaattcctgactctgggcacctgtacgcatccatcagggcaggccggaccctcacgcccgcaggggacctgcaggagaccttcagcgggatggatcaggtgcggctgatgaagaggattgcagaaatgacagatatcaaacccatcctgaggaagctcccgcgtatcaagaaacacttgttaaatggtgataatatgaggtgttcagtgaatgcgactcctcagcagatgcctcagacagaaaaagcggtcgaagacttccttagaagcatcggtcggagtaaaaaggaacggaggcctgtgcgcccacacacggtcgagaaacctgtgcccagcagctctggtggagatgcccacgttccccatggctcccaggtcattaggaagctggtcatggaacccaccttcaagccctggcagatgaagactcacttcctgatgcccttcccggtgaattacgtgggtgaatgcatccgaactgtcccctacacggacccagatcatgccagtcttaaaatccttgcacgtttgatgactgccaaattcttgcatacagaaattcgagaaaaaggcggtgcttatggtggangcgcaaaactcagccacaatgggattttcaccctttactcttacagggacccaaatacaatagagacgctccagtcttttgggaaggctgtcgactgggctaagtctggaaaattcacacagcaagacatcgacgaagccaaactttctgtcttctcaaccgtagatgctcctgtcgctccttcagacaaaggaatggaccacttcttgtacggcctctcggatgagatgaagcaggcccacagagagcagctctttgctgtcagccacgacaagctcctggccgtgagcgataggtacctcggcactgggaagagcacacacggcctggccatcctcggacccgagaacccgaaaattgccaaggacccatcctggatcatccgatgagcagccgtggcgctcgactgcacaggagcccgagacaatacacctccaagctgaatatgaaaagtcagaaatgctactgctttttccaagaatattatgtcattgagtgtcgccaaagcccttgactggcgagtcaaaaactcagatctatcttaagagtgaccaggaagaggttcattgaaataatcatgcatgaagcgccaaagatgcaccatgtagaattttcactttgtactggcaggctcgttttacctgattctagaatatttaagaatctaaaaataaagggcaactctgactta

SEQ ID NO: 314 - protein, 1038 aa, Homo sapiens
  Unsure 910: Unknown amino acid
MWRCGGRQGLCVLRRLSGGHAHHRAWRWNSNRACERALQYKLGDKIHGFTVNQVTSVPELFLTAVKLTHDDTGARYLHLAREDTNNLFSVQFRTTPMDSTGVPHILEHTVLCGSQKYPCRNPFFKMLNRSLSTFMNAFTASDYTLYPFSTQNPKDFQNLLSVYLDATFSPCLRELDFWQEGWRLEHENPSDPQTPLVFKGVVFNEMKGAFTDNERIFSQHLQNRLLPDHTYSVVSGGDPLCIPELTWEQLKQFHATHYHPSNARFFTYGNFPLEQHLKQIHEEALSKFQKIEPSTVVPAQTPWDKPREFQITCGPDSFATDPSKQTTVSVSFLLPDITDTFEAFTLSLLSSLLTSGPNSPFYKALIESGLGTEFSPDVGYNGYTREAYFSVGLQGIVEKDIETVRSLIDRTIDEVVETRIEDDRIEALLHKIEIQMKHQSTSFGLMLTSYIASCWNHDGDPVELLKLGNQLAKFRQCLQENPKFLQEKVKQYFKNNQHKLTLSMRPDDKYHEKQAQVEATKLKQKVEALSPGDRQQIYEKGLELRSQQSKPQDASCLPALKVSDIEPTIPVTELDVVLTAGDIPVQYCAQPTNGMVYFRAFSSLNTLPEELRPYVPLFCSILTKLGCGLLDYREQAQQIELKTGGMSASPHVLPDDSHMDTYEQVGVLFSSLCLDRNLPDMMQLWSEIFNNPCFEEEEHFKVLVKMTAQELANGIPDSGHLYASIRAGRTLTPAGDLQETFSGMDQVRLMKRIAEMTDIKPILRKLPRIKKHLLNGDNMRCSVNATPQQMPQTEKAVEDFLRSIGRSKKERRPVRPHTVEKPVPSSSGGDAHVPHGSQVIRKLVMEPTFKPWQMKTHFLMPFPVNYVGECIRTVPYTDPDHASLKILARLMTAKFLHTEIREKGGAYGGXAKLSHNGIFTLYSYRDPNTIETLQSFGKAVDWAKSGKFTQQDIDEAKLSVFSTVDAPVAPSDKGMDHFLYGLSDEMKQAHREQLFAVSHDKLLAVSDRYLGTGKSTHGLAILGPENPKIAKDPSWIIR

SEQ ID NO: 315 - DNA, 4357 bp, Homo sapiens
atagtcaccagaagctggaagagtcaaaggacacattctcccctcaagccccagtgggagcacggcccagctggattttggacttctggcctccagaactagacagggcctcacggtgtcacccagggtggaatacagtggtgtgatcatagctcactgcagcctggaattcctgggctcaagcaaccctgccacctcagccttccaagtagctaggactacagaacatccatgatagcagtcttctgtaaatcgaacttttcaagaattctctgaaggaaccaagtaggatattcttacatcatgacttaatgtgaatgcaagaacaagaaataggttttatctctaaatataatgaagggctgtgtgtaaacactgaccctgtctcaattctaacaagcattttagacatgagtttacatcggcaaatgggttcagatcgagatcttcagtcctctgcttcatctgtgagcttgccttcagtcaaaaaggcacccaaaaaaagaagaatttcaataggctccctgtttcggaggaaaaaagataacaaacgtaaatcaagggagctaaatggcggggtggatggaattgcaagtattgaaagtatacattctgaaatgtgtactgataagaactccattttctctacaaatacctcttctgacaatggattaacttccatcagcaaacaaattggagacttcatagagtgccctttgtgccttttgcggcattctaaagacagatttcctgatataatgacttgtcatcacagatcttgtgtggattgcttacgacaatatttaaggatagaaatctctgaaagcagagttaatattagttgcccagaatgtactgagcggtttaatccccatgatattcgcttgatattaagtgatgatgtcttgatggaaaaatacgaagaatttatgcttagacggtggcttgttgcagatcctgattgtaggtggtgtccagctccagactgtggatatgctgtgatagcatttggatgtgccagctgtccaaaattaacttgtgggcgagagggctgtggaacagagttttgctaccactgtaaacagatttggcaccccaaccagacctgtgatgctgctcgacaagagagagcccagagcttacgtttgagaactatacgttcttcatccattagttatagtcaagagtctggagcagcagctgatgatataaagccatgtccacgatgtgctgcttatataataaagatgaatgatgggagctgcaatcacatgacatgtgctgtttgtggttgtgagttttgttggttgtgtatgaaagaaatctcagatttgcattatctaagtccatcaggatgtactttttgggggaagaaaccctggagccgaaagaagaaaatattgtggcaactgggaacactggttggtgctcctgtcggaatcgctttaatagctggcattgctattcctgcaatgattattggcattcctgtgtatgtgggccgcaagattcacaatcgctatgaaggcaaggatgtttcaaagcacaaacggaatttggccatagcaggtggtgtaacgttgtctgtaatcgtgtctccagtagtagctgcagtgactgtaggtatcggtgttcctattatgttagcttatgtctatggcgtagttccaatttctctttgtcgaagcggaggttgtggagtctcagcaggcaatggaaaaggagttaggattgaatttgatgatgaaaatgatataaatgttggtggaactaacacagctgtagacacaacatcagtagcagaagcaagacacaacccaagcataggggagggaagtgttggtgggctgactggcagtttgagtgcaagtggaagccacatggatcgaataggagccatccgagacaacctgagtgaaacggccagcaccatggcactagctggagccagtataacggggagtctgtcaggaagtgccatggtaaactgttttaacaggttggaagtacaagcagatgtacagaaagaacggtacagtctaagtggagaatctggcacagtcagcttgggaacagttagtgataatgccagcaccaaagcaatggcaggatccattctgaattcctacatcccattggacaaagaaggcaacagtatggaggtgcaagtagatattgagtcaaagccatccaaattcaggcacaacagtggaagcagtagtgtggatgatggcagtgccacccgaagttatgctggcggttcatccagtggcttgcctgaaggtaaatctagtgccaccaagtggtccaaagaagcaacagcagggaaaaaatcaaaaagtggtaaactgaggaaaaagggtaacatgaagataaatgagacgagagaggacatggatgcacagttgttagaacaacaaagcacgaactcaagtgaatttgaggctccatccctcagtgacagtatgccttctgtagcagattctcactctagtcatttttctgaatttagttgttctgacctagaaagcatgaaaacttcttgtagtcatggttccagtgattatcacacccgctttgctactgttaacattcttcctgaggtagaaaatgaccgtctggaaaattccccacatcagtgtagcatttctgtggttacccaaactgcttcctgttcagaagtttcacagttgaatcatattgctgaagaacatggtaacaatggaataaaacctaatgttgatttatattttggcgatgcactaaaagaaacaaataacaaccactcacatcagacaatggaattaaaagttgcaattcagactgaaatttaggcccataaatgctgcagaataattaccactgtacaaccgtgtttggagctggttgaactacatgtgactacttaagtttcaggttaccagcaaaagccgggtttcattatcataatgcagatacattttctgtgttcagcaaggcattgtgtgtcatgtggatcttagttaccaaactatgaagtgaaggctttaaaagtgcattattttaaggataataaatttgaagagcaaagcatgttttgtgtgtttgccacaaaacattgcttgaagcacatacttagatagaaattggtcttaatttatataatcaatataaaatactaatgcaattctacagcattcaaatgaagaaaacttgaggctttagggataagtggttagtgatattttattgaaaccactaaagagataagtttaaaagaactgcataggttactctcagtatatgatactctgtaacatttctatttatatcggcataaatttcattttttttcttcatatgcaatgtggttatataaagcttaatgcagctcatttgctaccatttggatacttagacactttgagcaagattgtggcagtttttgcacaactttgaaatagaaatacctggtactctatcttgtttattgttgatgccatcttagaggaaaaaatgtaaaggtaagtaattaagcatatgacagcaacaaataagatacataaaactacaaaataaagtcccattaggttataagtattacaaaaaatccacctttctctaaggggaagtttgtaccccattgattcttggtgcctttgggatcgactgggttttaatggcctagttatttgaggattttgctgtgttgttttccatgtcttctctggtcaccttggattatatataaaaatacaggaaatagataaacatgaatgtgattaataatgctgaaaaagtattagcctaccaaagacacactcaggctttagtgaataactttacataacctcagtttttaacacatgcatatcttctccaaccatgaaatcaaagcacggtgcagaacttgtaccaagtacaaaaggtccatgtatgattagcattattttcttttgcttttgtttatggacaatgttcagctgacataagcagaagttggccaaaatactgcctgtactgttaatttcctgtataattcacttaaataaaagcaggttaacctcaatgatagcagttaaaatgttctatcttatgtatttcttttaagtattaccattatggtgctactgagcgttttcttttggtaaaaagaaaaatgccatgggctgcagtcttcttccatcacttttccctaccaggtccattaatatgcttataacactagtgccagttattttatttgataatgcttatggtatttgtatatttgtttgcattccaattttgtttaataatgagtgtgtaaactgcatacgttaaataaatgtaaatactaatgtactgctgcaaaaaaaaaaaaaaaaaaaaaaaaaaa

SEQ ID NO: 316 - protein, 838 aa, Homo sapiens
MQEQEIGFISKYNEGLCVNTDPVSILTSILDMSLHRQMGSDRDLQSSASSVSLPSVKKAPKKRRISIGSLFRRKKDNKRKSRELNGGVDGIASIESIHSEMCTDKNSIFSTNTSSDNGLTSISKQIGDFIECPLCLLRHSKDRFPDIMTCHHRSCVDCLRQYLRIEISESRVNISCPECTERFNPHDIRLILSDDVLMEKYEEFMLRRWLVADPDCRWCPAPDCGYAVIAFGCASCPKLTCGREGCGTEFCYHCKQIWHPNQTCDAARQERAQSLRLRTIRSSSISYSQESGAAADDIKPCPRCAAYIIKMNDGSCNHMTCAVCGCEFCWLCMKEISDLHYLSPSGCTFWGKKPWSRKKKILWQLGTLVGAPVGIALIAGIAIPAMIIGIPVYVGRKIHNRYEGKDVSKHKRNLAIAGGVTLSVIVSPVVAAVTVGIGVPIMLAYVYGVVPISLCRSGGCGVSAGNGKGVRIEFDDENDINVGGTNTAVDTTSVAEARHNPSIGEGSVGGLTGSLSASGSHMDRIGAIRDNLSETASTMALAGASITGSLSGSAMVNCFNRLEVQADVQKERYSLSGESGTVSLGTVSDNASTKAMAGSILNSYIPLDKEGNSMEVQVDIESKPSKFRHNSGSSSVDDGSATRSYAGGSSSGLPEGKSSATKWSKEATAGKKSKSGKLRKKGNMKINETREDMDAQLLEQQSTNSSEFEAPSLSDSMPSVADSHSSHFSEFSCSDLESMKTSCSHGSSDYHTRFATVNILPEVENDRLENSPHQCSISVVTQTASCSEVSQLNHIAEEHGNNGIKPNVDLYFGDALKETNNNHSHQTMELKVAIQTEI

SEQ ID NO: 317 - DNA, 2665 bp, Homo sapiens
ggctctgggcatcaccagcggccccagggaaaaagaaagaaatgggaaacagcatgaaatccacccctgcgcctgccgagaggcccctgcccaacccggagggactggatagcgacttccttgccgtgctaagtgactacccgtctcctgacatcagccccccgatattccgccgaggggagaaactgcgtgtgatttctgatgaagggggctggtggaaagctatttctcttagcactggtcgagagagttacatccctggaatatgtgtggccagagtttaccatggctggctgtttgagggcctgggcagagacaaggccgaggagctgctgcagctgccagacacaaaggtcggctccttcatgatcagagagagtgagaccaagaaagggttttactcactgtcggtgagacacaggcaggtaaagcattaccgcattttccgtctgccgaacaactggtactacatttccccgaggctcaccttccagtgcctggaggacctggtgaaccactattctgaggtggctgatggcctgtgctgtgtgctcaccacgccctgcctgacacaaagcacggctgccccagcagtgagggcctccagctcacctgtcaccttgcgtcagaagactgtggactggaggagagtgtccagactgcaggaggaccccgagggaacagagaacccgcttggggtagacgagtcccttttcagctatggccttcgagagagcattgcctcttacctgtccctgaccagtgaggacaacacctcctttgatcgaaagaagaaaagcatctccctgatgtatggtggcagcaagagaaagagctcattcttctcatcaccaccttactttgaggactagccaagaacagacacaatggttcatgcccaaaaggaacagaagttccaactattgcctgggatcttgcgaaaagcgaggttccctgatccctgggagcctcacgtattttagaagccaagagaagccacatggagactcaaattcgcatcttctctatccacatcatgaccaaaggaacccctccctggtgtctgatcagggctgtggcatcacaaaacattggatcatgacatgtcgggcgatgcttggaaaagcccagcatgtatgtatgcacacattgtgtgtgtgggaaggacaaagccactctcacaagaaagggcaccaggactgctctccaaggaactggacctgtccagacagttacactccaaggtcattggagagaacttctgtatgggcaagcctgagagggagaggaaacaaaagctgtgtcctggcagaaggtctgggtttgcagatgggtgccctgaatggaactactttaactaatccatagggacttctggtatgctttcctctctttttaaaggaacttcgtgacactaaacattagcccaaaggacttcttagccttcaattgggagatacctttggtctgctcctgcaccaaagccatatgggtggaagtcagttggcctccctggttctgcagagggccagaagaatgagagagaggaagactgctggcagggaaatcgaggaggcgagactagaactgcaccagcttccctgatgtctgcagccatggctttgcagcgcaaacagaacttctctgggatgctgggattcttgcctgtatgaatgcatcaagtattcatttattgcccgaataggcattgcattaagtcctctgttaggtgtcaggcaagccaaaaaaaaaaaaaagatgctaagtcctaacccccaacagaagtgttcacagtgtagacgggaaaaaatgtataaacaaatgtgtaaaaagagaaatcagctcatggcttaggatggaattagagacaggtgagggacactcaggagctcattttccagctgctcttcagagtggaagggctggctggatcgggtaggtaagaatagctggattttttagaaaagaaatggatacagtctaaagaattaactcacccggtactttattctaagaagggtctggcatccatatgaggaaaaatgctcagctccaggaaagatggggagtccaagtggattaatgatgtcatgcataattttaagagacaagggagaaaacacaatgtatagccagagaaggagaagctcccatccaaatcctactaggaagagagtgggctgcagatgaatctgtgactcatgtttccctgtttcaaagggatcctggggaaggaggggaacatgcttgcagtatctctccctgtctgtctgctcacataagcattccgtccatctaagctcatcgtgctactggtatgtgtatgtgcagttacacagtttcctgtatcataaatcctagtgtgtttatacaaggagacatctgtggtttccccaaccgttccaaaaggctatttcaaaggaaccagcccacgtatgagaaatgaatgtaacactgtggacattgacttcccgcataaggcagggtgaccccctgaactccagatgtttgcacagtatcttatgtgttgttttccgttgtgacgaatgtgattggaacatttggggagcacccagagggatttttcagtgggaagcattacactttgctaaatcatgtatttattcctgattaaaacaaacctaataaatatttaacccttggc

SEQ ID NO: 318 - protein, 276 aa, Homo sapiens
MGNSMKSTPAPAERPLPNPEGLDSDFLAVLSDYPSPDISPPIFRRGEKLRVISDEGGWWKAISLSTGRESYIPGICVARVYHGWLFEGLGRDKAEELLQLPDTKVGSFMIRESETKKGFYSLSVRHRQVKHYRIFRLPNNWYYISPRLTFQCLEDLVNHYSEVADGLCCVLTTPCLTQSTAAPAVRASSSPVTLRQKTVDWRRVSRLQEDPEGTENPLGVDESLFSYGLRESIASYLSLTSEDNTSFDRKKKSISLMYGGSKRKSSFFSSPPYFED

SEQ ID NO: 319 - DNA, 5097 bp, Homo sapiens
ctgcaggaaggagagaggaagaggagcagaagggggcagcagcggacgccgctaacggcctccctcggcgctgacaggctgggccggcgcccggctcgcttgggtgttcgcgtcgccacttcggcttctcggccggtcgggcccctcggcccgggcttgcggcgcgcgtcggggctgagggctgctgcggcgcagggagaggcctggtcctcgctgccgagggatgtgagtgggagctgagcccacactggagggcccccgagggcccagcctggaggtcgttcagagccgtgcccgccccggggcttcgcagaccttgacccgccgggtaggagccgcccctgcgggctcgagggcgcgctctggtcgcccgatctgtgtagccggtttcagaagcaggcaacaggaacaagatgtgaactgtttctcttctgcagaaaaagaggctcttcctcctcctcccgcgacggcaaatgttctgaaaaagactctgcatgggaatggcctgccttacgatgacagaaatggagggaacatccacctcttctatatatcagaatggtgatatttctggaaatgccaattctatgaagcaaatagatccagttcttcaggtgtatctttaccattcccttgggaaatctgaggcagattatctgacctttccatctggggagtatgttgcagaagaaatctgtattgctgcttctaaagcttgtggtatcacacctgtgtatcataatatgtttgctttaatgagtgaaacagaaaggatctggtatccacccaaccatgtcttccatatagatgagtcaaccaggcataatgtactctacagaataagattttactttcctcgttggtattgcagtggcagcaacagagcctatcggcatggaatatctcgaggtgctgaagctcctcttcttgatgactttgtcatgtcttacctctttgctcagtggcggcatgattttgtgcacggatggataaaagtacctgtgactcatgaaacacaggaagaatgtcttgggatggcagtgttagatatgatgagaatagccaaagaaaacgatcaaaccccactggccatctataactctatcagctacaagacattcttaccaaaatgtattcgagcaaagatccaagactatcatattttgacaaggaagcgaataaggtacagatttcgcagatttattcagcaattcagccaatgcaaagccactgccagaaacttgaaacttaagtatcttataaatctggaaactctgcagtctgccttctacacagagaaatttgaagtaaaagaacctggaagtggtccttcaggtgaggagatttttgcaaccattataataactggaaacggtggaattcagtggtcaagagggaaacataaagaaagtgagacactgacagaacaggatttacagttatattgcgattttcctaatattattgatgtcagtattaagcaagcaaaccaagagggttcaaatgaaagccgagttgtaactatccataagcaagatggtaaaaatctggaaattgaacttagctcattaagggaagctttgtctttcgtgtcattaattgatggatattatagattaactgcagatgcacatcattacctctgtaaagaagtagcacctccagccgtgcttgaaaatatacaaagcaactgtcatggcccaatttcgatggattttgccattagtaaactgaagaaagcaggtaatcagactggactgtatgtacttcgatgcagtcctaaggactttaataaatattttttgacttttgctgtcgagcgagaaaatgtcattgaatataaacactgtttgattacaaaaaatgagaatgaagagtacaacctcagtgggacaaagaagaacttcagcagtcttaaagatcttttgaattgttaccagatggaaactgttcgctcagacaatataattttccagtttactaaatgctgtcccccaaagccaaaagataaatcaaaccttctagtcttcagaacgaatggtgtttctgatgtaccaacctcaccaacattacagaggcctactcatatgaaccaaatggtgtttcacaaaatcagaaatgaagatttgatatttaatgaaagccttggccaaggcacttttacaaagatttttaaaggcgtacgaagagaagtaggagactacggtcaactgcatgaaacagaagttcttttaaaagttctggataaagcacacagaaactattcagagtctttctttgaagcagcaagtatgatgagcaagctttctcacaagcatttggttttaaattatggagtatgtgtctgtggagacgagaatattctggttcaggagtttgtaaaatttggatcactagatacatatctgaaaaagaataaaaattgtataaatatattatggaaacttgaagttgctaaacagttggcatgggccatgcattttctagaagaaaacacccttattcatgggaatgtatgtgccaaaaatattctgcttatcagagaagaagacaggaagacaggaaatcctcctttcatcaaacttagtgatcctggcattagtattacagttttgccaaaggacattcttcaggagagaataccatgggtaccacctgaatgcattgaaaatcctaaaaatttaaatttggcaacagacaaatggagttttggtaccactttgtgggaaatctgcagtggaggagataaacctctaagtgctctggattctcaaagaaagctacaattttatgaagataggcatcagcttcctgcaccaaagtgggcagaattagcaaaccttataaataattgtatggattatgaaccagatttcaggccttctttcagagccatcatacgagatcttaacagtttgtttactccagattatgaactattaacagaaaatgacatgttaccaaatatgaggataggtgccctagggttttctggtgcctttgaagaccgggatcctacacagtttgaagagagacatttgaaatttctacagcaacttggcaagggtaattttgggagtgtggagatgtgccggtatgaccctctacaggacaacactggggaggtggtcgctgtaaaaaagcttcagcatagtactgaagagcacctaagagactttgaaagggaaattgaaatcctgaaatccctacagcatgacaacattgtaaagtacaagggagtgtgctacagtgctggtcggcgtaatctaaaattaattatggaatatttaccatatggaagtttacgagactatcttcaaaaacataaagaacggatagatcacataaaacttctgcagtacacatctcagatatgcaagggtatggagtatcttggtacaaaaaggtatatccacagggatctggcaacgagaaatatattggtggagaacgagaacagagttaaaattggagattttgggttaaccaaagtcttgccacaagacaaagaatactataaagtaaaagaacctggtgaaagtcccatattctggtatgctccagaatcactgacagagagcaagttttctgtggcctcagatgtttggagctttggagtggttctgtatgaacttttcacatacattgagaagagtaaaagtccaccagcggaatttatgcgtatgattggcaatgacaaacaaggacagatgatcgtgttccatttgatagaacttttgaagaataatggaagattaccaagaccagatggatgcccagatgagatctatatgatcatgacagaatgctggaacaataatgtaaatcaacgcccctcctttagggatctagctcttcgagtggatcaaataagggataacatggctggatgaaagaaatgaccttcattctgagaccaaagtagatttacagaacaaagttttatatttcacattgctgtggactattattacatatatcattattatataaatcatgatgctagccagcaaagatgtgaaaatatctgctcaaaactttcaaagtttagtaagtttttcttcatgaggccaccagtaaaagacattaatgagaattccttagcaaggattttgtaagaagtttcttaaacattgtctgttaacatcactcttgtctggcaaaagaaaaaaaatagactttttcaactcagctttttgagacctgaaaaaattattatgtaaattttgcaatgttaaagatgcacagaatatgtatgtatagtttttaccacagtggatgtataataccttggcatcttgtgtgatgttttacacacatgagggctggtgttcattaatactgttttctaatttttccatagttaatctataattaattacttcactatacaaacaaattaagatgttcagataattgaataagtacctttgtgtccttgttcatttatatcgctggccagcattataagcaggtgtatacttttagcttgtagttccatgtactgtaaatatttttcacataaagggaacaaatgtctagttttatttgtataggaaatttccctgaccctaaataatacattttgaaatgaaacaagcttacaaagatataatctattttattatggtttcccttgtatctatttgtggtgaatgtgttttttaaatggaactatctccaaatttttctaagactactatgaacagttttcttttaaaattttgagattaagaatgccaggaatattgtcatcctttgagctgctgactgccaataacattcttcgatctctgggatttatgctcatgaactaaatttaagcttaagccataaaatagattagattgttttttaaaaatggatagctcattaagaagtgcagcaggttaagaattttttcctaaagactgtatatttgaggggtttcagaattttgcattgcagtcatagaagagatttatttcctttttagaggggaaatgaggtaaataagtaaaaaagtatgcttgttaattttattcaagaatgccagtagaaaattcataacgtgtatctttaagaaaaatgagcatacatcttaaatcttttcaatta

SEQ ID NO: 320 - protein, 1132 aa, Homo sapiens
MGMACLTMTEMEGTSTSSIYQNGDISGNANSMKQIDPVLQVYLYHSLGKSEADYLTFPSGEYVAEEICIAASKACGITPVYHNMFALMSETERIWYPPNHVFHIDESTRHNVLYRIRFYFPRWYCSGSNRAYRHGISRGAEAPLLDDFVMSYLFAQWRHDFVHGWIKVPVTHETQEECLGMAVLDMMRIAKENDQTPLAIYNSISYKTFLPKCIRAKIQDYHILTRKRIRYRFRRFIQQFSQCKATARNLKLKYLINLETLQSAFYTEKFEVKEPGSGPSGEEIFATIIITGNGGIQWSRGKHKESETLTEQDLQLYCDFPNIIDVSIKQANQEGSNESRVVTIHKQDGKNLEIELSSLREALSFVSLIDGYYRLTADAHHYLCKEVAPPAVLENIQSNCHGPISMDFAISKLKKAGNQTGLYVLRCSPKDFNKYFLTFAVERENVIEYKHCLITKNENEEYNLSGTKKNFSSLKDLLNCYQMETVRSDNIIFQFTKCCPPKPKDKSNLLVFRTNGVSDVPTSPTLQRPTHMNQMVFHKIRNEDLIFNESLGQGTFTKIFKGVRREVGDYGQLHETEVLLKVLDKAHRNYSESFFEAASMMSKLSHKHLVLNYGVCVCGDENILVQEFVKFGSLDTYLKKNKNCINILWKLEVAKQLAWAMHFLEENTLIHGNVCAKNILLIREEDRKTGNPPFIKLSDPGISITVLPKDILQERIPWVPPECIENPKNLNLATDKWSFGTTLWEICSGGDKPLSALDSQRKLQFYEDRHQLPAPKWAELANLINNCMDYEPDFRPSFRAIIRDLNSLFTPDYELLTENDMLPNMRIGALGFSGAFEDRDPTQFEERHLKFLQQLGKGNFGSVEMCRYDPLQDNTGEVVAVKKLQHSTEEHLRDFEREIEILKSLQHDNIVKYKGVCYSAGRRNLKLIMEYLPYGSLRDYLQKHKERIDHIKLLQYTSQICKGMEYLGTKRYIHRDLATRNILVENENRVKIGDFGLTKVLPQDKEYYKVKEPGESPIFWYAPESLTESKFSVASDVWSFGVVLYELFTYIEKSKSPPAEFMRMIGNDKQGQMIVFHLIELLKNNGRLPRPDGCPDEIYMIMTECWNNNVNQRPSFRDLALRVDQIRDNMAG

SEQ ID NO: 321 - DNA, 3140 bp, Homo sapiens
aaacactttgtcctccaaaaggaagacagacttcacgtcattcatctgttcaatactcttccgaacaacaggaaattttgccagctaatgattctcttgcttacagtgactcagctggtagctttttaaaagaagtagaccgagacatagaacaaatagtaaagtgtacagacaataagagagagaacctcaatgaggtagtatcggccttaacagcacaacaaatgcgttttgaacctgataacaaaaacactcaacgtaaagacccctattatggagcagactggggaatagggtggtggacagctgtagtgataatgttgatagtaggtataataacaccagtgttttatttgttgtattatgaaattttagctaaggtggatgttagtcatcattcaacagtggactcttcacatttacattcaaaaatcacacccccatcacagcagagagaaatggaaaatggaattgtgccaactaaaggaatacatttcagccaacaagatgatcataaactgtatagtcaagattctcagtcacctgctgctcaacaggaaacatagcaattagctcataatcaaatgttagtggtcaggtcacatgtgcatctggaatgtggtgaatcagttatatccaataatagcttcaaaggcagaatttagagagattgaggatgcttttgtttttaacaaaagggtttcacactttgaaaattttttgagcaactagttgttgatgttgagagcagttgatccataaatctggtgtgtgaatgtttcaagcagaaattaatttaaatgtgtgtttaggaagtacttaacttggaagatgtatcatttttcttaaaatgcatgtttaaattttatttttttaagtaatttttaaaaagtttattaatgttaaatttatgatgcagaatgatagcatcagatgtctgcagctgaaaaaaatttactactatgaacccccaaaatattcagttgcaagaaaatttgattctaaaattattcatggtaggatacgtaacacaccccttcaaaacttttaaaaaatacatttagcacatgtgctatgaaagcatacgtacaaagagaaaggggaaagtgatttataattcctacaacagaggccaagaaatagattaaaatattttcaagaccccaaaataatgtattatggttgggaagtcagtagaacactggaataggtgaagacctgacagtaatttttgtcttaagaatgctttctttaggacagaccctttaacctcacctctgtgcatctgtttttaaaatgattatatttgcctctgatatttgaaagcacttttgtagttttgatgatgaaaaatatattaaacgtgcatattaccattatttaggaaataattccttatatactgtgataaatcattgctgttacatacagtaacatgccttaattacatttaatgccttactgctttatgtaagtaaatccaagtttcagaattaaaaataagcattatttcatatggtccaatcagattcgttacataggctatataaatttgtctccattttcaccatcaagcacaaataattgggtcaaaactgcctttgaggtctgttgaagaaaatggttcattaagcaaaaaagagtagaggtattttatattagcagtaacagacaaattatttagtaatcccttaacctctgtttttcaaagagaaaatatccaatttagacttttttcctgatctctatatatagcatcaagttgggaaacaaaggccaaaggtgtatagattgcttgaaagggggtggtagtgcctctttttaagatctgttgagtcggctacagtctggctaagtaagaagcatttgcatactgattccatcatttaatctttaaaagtatgtgttttaaaaatgtaaccagaatgattcttcaatagaaatgagatttggtggagtctggattgcctgttttgtatataatatatacttaagatatataataccacctcattttctgggcattatttcctaattgttgatgtttcaggcttttgataagtcattttatatatttcaaatttaactcagaataagtaaatatttatggcaaatgcagttttatgtactttcaggagaagaccatcaggaaaagacaggacaaagaagtcaaacattaaagcccttgcaaatattagaggaccttagacaattaccaaaaagtgtttaatagggaagttgcaaatgattctcttagtaaattaaacatttaaaaagtagttttaatgtgccttgggcatcttgaaaagaagagtgtgatataatttatgcttagtgttaactggtcattttacattgtatttattaagtctgctgaaaaatgaggttttaaggaagaaaatgcagattattttagggtaaacaggccaggtgtcctttgaagaactttgtttacatcaaattgatgaaattacagtgattccttactttttttgctagttgtactttgaaattgttatgggttcgatttccaaaatatgtaacttattttttaaaggaataaggtgtgctgtgtatttgttgattaaaaatcatttgtcttgcagagtatccttttttgaaggaaatatacatccttataacacatcaggtagttttcttttttctgtatttaaattatatatttgaattaattgaatataatttgagttacatataattctatataaaggttacatattgaattatggttctaatctgtttaggaaagaaatgaattttctaagcatttaatacatttggaataattttagtttctaaaaagtactaatgtaagttaagtttatatcaaatgcaaattaccttgtataactaacaagcacagttattgtttaacattatggattttaattgtgttgacacccttctttgaatttgttgctttacatgtgtgtctgtgtgtgtgtctgcatgtgtgcacgcatgtacttgtatgcaatgtaaaagtaacagcagaatcattgcatttggtttacttaaaattttggagttagcaagtaaacaaaaagctgatagttttatgaagtctcggttaaaataaaatttctttgctatctcaaaaaaaaaaaaaaaaaaaaaaa

SEQ ID NO: 322 - DNA, 598 bp, Homo sapiens
  Unsure 124: Unknown base
cataacacagccagctttttgctagccagaccaaactcaaagagcaatggctgtacttctgaaatagcaacactttgtcctagctgagatttggtaataagattttttttttaagtttttaaangaagctcagtggttgaaagtctgcttaactgaaacagtaacatccatgatgtgtgttttgtgcatgtttgtatttgaaaggccttcatgtttttgtttcttgtttgtttttctctcctaagaccttgtcttttttttgtagcaaaagtttttttttttttttccttttacttctcagttgactgaattctgttttcaccggattttttgactaaaatagctattgcaacagaggctactcttgggttaaggaagaatgtagtttcgttttatgtttaatatcgctcaaagaaaaataaaagcatctccctctaacaccaccagacttttcctctctgtaccttatcatgtaaattttgctatttgattttcacctgggttgtttcctttaatgtgcaaaaatttaaggctatttagctgacaactgcctagggttgtaaaacaggttatcaagaatctgaaagtctaagatagg

SEQ ID NO: 323 - DNA, 939 bp, Homo sapiens
gggcttcctggggagggtgtggcagggtggtgggcatcccctccctcaccaaagcatgggctctttgtttcctctttgccaggcctgggtccttcccagtgacccctcagccttcacttcctcctcactcccggggagctgtgacaggtgtttgggggaggggaggggggtatgataagctgggacagctgcacccaccggtgctctggtgagatggggggcccggatgttggggagacacatctgctgggttcccagcccaaggtccccaaccctggctgtctggccttgtctgtcaccccccgtgcccactggcagggacaggaagctccccccccaccccgctttgggcagtttgccttggcacgggcctgatctgttttcctccccagagcagctgctgttctgtctgctgggcagagggctgggttcctccgaggtaggcaggggcctcaacccagagcccctctcacaccctctttcaactcaggcttatgtctctccctcctcccccacccccaccccaggaagaggagatcccagaactggagattgacgtggatgagctcctggacatggagagtgacgatgcccgggctgccagggtcaaggagctgctggttgactgttacaaacccacagaggccttcatttctggcctgctggacaagatccggggcatgcagaagctgagcacaccccagaagaagtgagggtccccgacccaggagaacggtggctcccacaggacaatcgctgccccccaacctcgtagcaacagcaataccgggggaccctgcggccaggcctggtgccatgagcagggctcctcgtgcccctggcccaggggtctcttcccctgccccctcagttttccacttttggggttttttattgttattaaactgatgggactttaaaaaaaaaaaaaaaaaaaaa

SEQ ID NO: 324 - protein, 109 aa, Homo sapiens
MLGRHICWVPSPRSPTLAVWPCLSPPVPTGRDRKLPPHPALGSLPWHGPDLFSSPEQLLFCLLGRGLGSSEVGRGLNPEPLSHPLSTQAYVSPSSPTPTPGRGDPRTGD

SEQ ID NO: 325 - DNA, 1190 bp, Homo sapiens
ggcacgaggctgaggtgtatttcgggtcttgctggggctgagagagaccacagccctttggggggtacaaacaagagttcagttgctgtgaattctgccactgtgcccagctctgaagcctcagctcttgccaaacagacccgagacccatgtcagccccactggatgccgccctccacgcccttcaggaggagcaggccagactcaagatgaggctgtgggacctgcagcagctgagaaaggagctcggggactcccccaaagacaaggtcccattttcagtgcccaagatccccctggtattccgaggacacacccagcaggacccggaagtgcctaagtctttagtttccaatttgcggatccactgccctctgcttgcgggctctgctctgatcacctttgatgaccccaaagtggctgagcaggtgctgcaacaaaaggagcacacgatcaacatggaggagtgccggctgcgggtgcaggtccagcccttggagctgcccatggtcaccaccatccaggtgatggtgtccagccagttgagtggccggagggtgttggtcactggatttcctgccagcctcaggctgagtgaggaggagctgctggacaagctagagatcttctttggcaagactaggaacggaggtggcgatgtggacgttcgggagctactgccagggagtgtcatgctggggtttgctagggatggagtggctcagcgtctgtgccaaatcggccagttcacagtgccactgggtgggcagcaagtccctctgagagtctctccgtatgtgaatggggagatccagaaggctgagatcaggtcgcagccagttccccgctcggtactggtgctcaacattcctgatatcttggatggcccggagctgcatgacgtcctggagatccacttccagaagcccacccgcgggggcggggaggtagaggccctgacagtcgtaccccaaggacagcagggcctagcagtcttcacctctgagtcaggctaggggcctccccttctcatcctccccacccccccgccaaggttctcacactggcctgggcttgggtgcccatataggaggtctgtatgttcaccaacagtgcggaggggtcacacattgcaaaacactgcccagaacagtaaaaagagcctgcatgccaaaaaaaaaaaaaaaaaa

SEQ ID NO: 326 - protein, 288 aa, Homo sapiens
MSAPLDAALHALQEEQARLKMRLWDLQQLRKELGDSPKDKVPFSVPKIPLVFRGHTQQDPEVPKSLVSNLRIHCPLLAGSALITFDDPKVAEQVLQQKEHTINMEECRLRVQVQPLELPMVTTIQVMVSSQLSGRRVLVTGFPASLRLSEEELLDKLEIFFGKTRNGGGDVDVRELLPGSVMLGFARDGVAQRLCQIGQFTVPLGGQQVPLRVSPYVNGEIQKAEIRSQPVPRSVLVLNIPDILDGPELHDVLEIHFQKPTRGGGEVEALTVVPQGQQGLAVFTSESG

SEQ ID NO: 327 - DNA, 2440 bp, Homo sapiens
atcgaatccatacccgaatttcaactttaacatctctcatcaaggagactatgcagtgcttgctgctgaacctgagctgcaagttggaattgatataatgaagactagttttccaggtcgtggttcaattccagaattctttcatattatgaaaagaaagtttaccaacaaagaatgggaaacaatcagaagctttaaggatgagtggactcagctggatatgttttataggaattgggcacttaaggaaagcttcataaaagccattggtgttggactaggatttgaattgcagcggcttgaatttgatctatctccattaaacttggatataggccaagtttataaagaaacacgtttattcctggatggagaggaagaaaaagaatgggcatttgaggaaagcaaaatagatgagcaccattttgttgcagttgctcttaggaaacccgacggatctagacatcaggatgttccatctcaggatgattccaaaccaacccagaggcaatttactattctcaactttaatgatttaatgtcatctgccgttcccatgacacctgaagatccttcattttgggactgtttttgcttcacagaagaaattccaatacgaaatggtacaaagtcatgatgattccctgagtaacaaagggaaatgaaaactgtttgtgatcttccgtattcactgaaaaataaatgcttgtttagtatcaaattttatttcacgaaagttttttaaagaacagaaacttttccaattaaaaaaaaaaagcagacttctggttcaagatagctcactggaatacatgtttacctctttctttcctaaattgcattgaattgataggaaggatggcggaatcttaaagtgatacatgctaactgtagaaaaaaatagaaaatgcacataagcaaaaggaaacatttaaatgctatctttcaaagataactactcttaaaaccttgagtatcttttcagacctttttcttggcaaatgaatccatattgacatatttgattttttttaaaaacatggaaacgtactgttttgtaaattctttttaactgcacatctactgttcataaatatacctctgtaacataactttttgtggttctaatgtactctgttgtatagctaatacaagttaggatgcttttggccagaggtaacagtgtccaaatataattggcctaagtaacctaggaaattgtttgacataacacagggttcaggggtgtcattaaagacacactttttttgccttgacctcagttggtttgttttgccttaggctattccacctctcgatcacaagagctgctgctataacttccagttttacatctttgtaaaattgtatctcaaaggcagaaaaggccatttcgtctctcatttgttttatccatgaggaagatttttaacaaaagcctccagaagatttcccctcagtttccattgacttagatcaggttacagagaaaggcaatgtctgacatttttggtctctgttagaagtagactctgttgaaaagaaagaagctaagctaggtgtggagaatggaattggaagcccactgccttcccataagaaaggtttaccataatttacttacttttttctgtgttagacattttgattatctgcagtttattactacaagcagtggcagagtgaatgtccttgtacattttgagttacatgcttaattatgtccttgagaaagtttctaatagtggaatgattggtttgactggttcatagggctttaattatacaatttacccctctaattagtactatatgtatgtgacttccctccccctgccagaatactccttggtcaattgtaggtattctttttggtttaatttttgccaatgtaattaaaaaatggtatgtcatttttaaaatttgtatttctttcattacaaataagattgttatgtcagtattgttattggcttttcgtattcctcttaacgtgatccgtctgttcattgtttttacctgttttcgttttagcaagtagtacttaatttaaagtgtgaacttaatatataagatgccaggaccatcatattgatgacaaaaatctattatgtggttgtagtgcatgtcttggagttaaactcttaagtatcaagaagtaaaataatttcattgtttctgttactaacattaaaagtgtgcaaattgtataaaattaggtacttcgattagtaaaagaaaaaaatttgaatgtttttttttttattttattaagcatgcccagttatgccaagcatagtaaataaaggtcaagtagcatttataatagaggaagtattgttatccctagcatgagtgtaatggtgatatgaaaaactttgtcttgtcattataataataaaaaaatgaacatttattatgaaaaaaaaaaaaaaaaaaa

SEQ ID NO: 328 - DNA, 1790 bp, Homo sapiens
gacgcgcctgaggaggaggaggaggcgggggcggccatggctgctgtggtggtggcggctgcgggtggcgcgggaccggcggtcctgcaggtggccggtctctaccggggcctgtgcgcggtgcgcagccgcgccctgggcctggggctcgtgtcacccgcgcagctgcgcgtcttcccagtgcgccccggctcgggccggcccgaggggggcgccgacggcagcggggtcggggccgaggccgagctccaggccaaccctttctacgaccgctaccgcgacaagatccagctgctgcgcaggtcagacccagctgcttttgagtcccgcctggagaaacgcagtgaatttcggaagcagccagtggggcattccaggcaaggtgattttatcaaatgtgtggaacagaagacagatgccttggggaaacagtctgtgaacagaggattcactaaggacaagactctcagttcaatctttaacattgagatggtaaaagaaaaaactgcagaagaaataaaacagatttggcagcaatattttgcagcaaaagatacagtctacgcagttattcctgcagaaaagtttgatttgatctggaaccgggctcagtcctgtccaacatttctatgtgctctgccaagaagggaaggttatgagttttttgtaggacaatggacaggtactgaactccacttcactgcacttataaatattcagacccgaggggaagctgcagccagccagctgattttatatcactatcctgaacttaaggaagaaaagggcatagtgctgatgactgcagaaatggattccacatttctgaatgttgctgaggcacagtgcatcgccaaccaagttcagctcttctacgctactgatcggaaagagacctacgggttagtggagacctttaacctcagaccaaatgagttcaaatatatgtctgtcatcgctgaattggagcaaagcggacttggagcagaactgaaatgtgcccagaaccaaaataagacttagaactgtacaggttggcccttcacctagttgactcagccctcgatagtctagagcccaccccctcctcaggaactcaagagctcagcatttataatgagcagttggtaatgagttgccctatgtgcttgtcgcaagcagtcacagagatgagccctattacttgatattcaggaacaaaggtacctgaacattctgataattatctcagcatacttgaggtttccttttttaagtgttcgaggttataacaagagacagccaaggacctacaagacagttgacttgattttgcacagtgtaacagcgcagttgcattctggccactttgaccttatagctcccaaatgatgagtttgtcatctttatgaactcatgacaggataataagcttgaagacctgctgtagttagatatgggctttaatccttcccatgcaccagtcagctgaacaaaagcataagccaaacatcctgtttaaactgtagaataaccagatattcccatcaggttaaagacttcatctagatgatgccccccagagatgcctttagtgtaagtagctggcttggggtatcagcaaatttcaggtatagttagataaacaggtacagggcctgcatactattaaaccatagtttgtggcacccgcttttctaactccacctgttagaagctatgtgtttgaaggaatgaatcagtgcagtataaataaaattcttttgtaaggagaagaccaaaaaaaaaaaaaaaaaaaaaaaaaaaaaaaa

SEQ ID NO: 329 - protein, 328 aa, Homo sapiens
MAAVVVAAAGGAGPAVLQVAGLYRGLCAVRSRALGLGLVSPAQLRVFPVRPGSGRPEGGADGSGVGAEAELQANPFYDRYRDKIQLLRRSDPAAFESRLEKRSEFRKQPVGHSRQGDFIKCVEQKTDALGKQSVNRGFTKDKTLSSIFNIEMVKEKTAEEIKQIWQQYFAAKDTVYAVIPAEKFDLIWNRAQSCPTFLCALPRREGYEFFVGQWTGTELHFTALINIQTRGEAAASQLILYHYPELKEEKGIVLMTAEMDSTFLNVAEAQCIANQVQLFYATDRKETYGLVETFNLRPNEFKYMSVIAELEQSGLGAELKCAQNQNKT

SEQ ID NO: 330 - DNA, 2108 bp, Homo sapiens
ctgtcaccaagcaggagagttaaggattcaccatgagctgggaaatgcttttgccatgagtatgagcaaattccctctttccctgaatcatggacattctagattaaaagaacattttttgtgctcttaacaagaaaaccatggccctcctttgttcaagtatcacaagaaataaacccacagctccagagaaggtgaccattctcagaactccagctattcactctccagggagaaggacctcaaatcgccactctttgggcggcaggtgcggtccccacggccggctctacgaggaagagttctggctcttttgtccactgagatggtcttggtttttcacttaacaaattttttaatggaatctttgtttttgttctccatcttgtttgttagagtctctcggcctttatttacaaattccttgcaactagagcgctccttccccaagatatggtagtgagagtaatttttcattgtagctgtagtctccatcagtaacagcaggccctggaagacttgatcacctttttctgtgtcattttcagtcaaagagggcctctcttacatcttgtttgctttcaaatccccaaatatcatctccatctcccaattaattttattctctctttcctctgtattcgctttctcctgttttttttttaaaaaaaagcatgaaaaaggaagagaaaaagtttgatatgccaaggacagattttgaaacagacttggtaaatgttttccttagctccttcatgggcatgctggtgaaagaataaatacatccaattaaagctcatgctggggtcggggagaagaggatactgaaacatttgtgaaatgtatgaatgcacttctgtaaccagatacttctgttcttctgttcaaattgtggggtttttgttacagttaggacgcccatgaagatttaggggtgaaaaaaacagcagagtatttattaaactacagcattgtacaattagcttagtaacactatggaataagctaaaacatatcacagtttttacatgggccaaaacatgaattgagtatgtggtcacatgaaaacacgcatgaatgaataaaacactctttggtggtgactgaggcatcattagaaggcccagacgatttccactattcacagcatttccttttctcagaaggactctttatatttccatgtaaatctagatctttggagcaattaagatggaattacaatttctagggagcattttaaggaaaatgttttggctttttcataattttatgtcttacagtatggaattataatacgaaaatctttatatgagttttggcttcttggtatttgtacttattcaggggaaaaagtctttcgattacttatgcctctatagagcttaatttcttgagaaattcaacagtcattttcaccagcataattttatcttaaggaataactaataggaaaagtcagcttaattatttaaggccctagtttctacatataatatattcgatagtaatgaaaatctgccgtggaattaactaataagtagtaacaataaacttcatatttagaatgcaaagtctataaagaataattttacatgatcctcaatatcaactccagtttaaaaagtgttatttttaaaacatttgaaaccaagtactgtttaatttcaatcagaagatgcaaataaatactttgatctatgtttgattttgctaataatatttgaaggagattgcctaccaaggacaaaacaataaatttaaaaatcaaacgatttctccatacgctcatagtcacatatggaattttgagaaaataaagcatgctgtctttaggaatttttatacttctttgtctttcttccttaatatttgcttctagctgctcttggcaatgatgaattgttatgtatgcattaatgttttgcagcccaaaagttgttcacatttttcctatataagatctgtggagtgtgtgtttcaaagagagaactacagaaatgttaaagcaggaaaacctgaatgtgatgtgcacattttcatcccacatggacaatgtatgtgttttaataaatggaattttcagattcaaaaaaaaaaaaaaattc

SEQ ID NO: 331 - DNA, 2530 bp, Homo sapiens
ctaaagtggagcccagcggcgggtgtgagagtccgtaaggagcagcttccaggatcctgagatccggagcagccggggtcggagcggctcctcaagagttactgatctatgaaatggcagagaatggaaaaaattgtgaccagagacgtgtagcaatgaacaaggaacatcataatggaaatttcacagacccctcttcagtgaatgaaaagaagaggagggagcgggaagaaaggcagaatattgtcctgtggagacagccgctcattaccttgcagtatttttctctggaaatccttgtaatcttgaaggaatggacctcaaaattatggcatcgtcaaagcattgtggtgtcttttttactgctgcttgctgtgcttatagctacgtattatgttgaaggagtgcatcaacagtatgtgcaacgtatagagaaacagtttcttttgtatgcctactggataggcttaggaattttgtcttctgttgggcttggaacagggctgcacacctttctgctttatctgggtccacatatagcctcagttacattagctgcttatgaatgcaattcagttaattttcccgaaccaccctatcctgatcagattatttgtccagatgaagagggcactgaaggaaccatttctttgtggagtatcatctcaaaagttaggattgaagcctgcatgtggggtatcggtacagcaatcggagagctgcctccatatttcatggccagagcagctcgcctctcaggtgctgaaccagatgatgaagagtatcaggaatttgaagagatgctggaacatgcagagtctgcacaagactttgcctcccgggccaaactggcagttcaaaaactagtacagaaagttggattttttggaattttggcctgtgcttcaattccaaatcctttatttgatctggctggaataacgtgtggacactttctggtacctttttggaccttctttggtgcaaccctaattggaaaagcaataataaaaatgcatatccagaaaatttttgttataataacattcagcaagcacatagtggagcaaatggtggctttcattggtgctgtccccggcataggtccatctctgcagaagccatttcaggagtacctggaggctcaacggcagaagcttcaccacaaaagcgaaatgggcacaccacagggagaaaactggttgtcctggatgtttgaaaagttggtcgttgtcatggtgtgttacttcatcctatctatcattaactccatggcacaaagttatgccaaacgaatccagcagcggttgaactcagaggagaaaactaaataagtagagaaagttttaaactgcagaaattggagtggatgggttctgccttaaattgggaggactccaagccgggaaggaaaattcccttttccaacctgtatcaatttttacaacttttttcctgaaagcagtttagtccatactttgcactgacatactttttccttctgtgctaaggtaaggtatccaccctcgatgcaatccaccttgtgttttcttagggtggaatgtgatgttcagcagcaaacttgcaacagactggccttctgtttgttactttcaaaaggcccacatgatacaattagagaattcccaccgcacaaaaaaagttcctaagtatgttaaatatgtcaagctttttaggcttgtcacaaatgattgctttgttttcctaagtcatcaaaatgtatataaattatctagattggataacagtcttgcatgtttatcatgttacaatttaatattccatcctgcccaacccttcctctcccatcctcaaaaaagggccattttatgatgcattgcacaccctctggggaaattgatctttaaattttgagacagtataaggaaaatctggttggtgtcttacaagtgagctgacaccattttttattctgtgtatttagaatgaagtcttgaaaaaaactttataaagacatctttaatcattccaaaattgtgtccgttttcttgagcgttttgattttttacttttagcttataccagctgaatggcagccttgcctaatccacctacaacaagaatttcttaagctttcttttatttgcatgagagagccactaccaaggcatgttttgttatgctgaaactgggctgctgcatactgctaaatggcacctctgggattggcctacctggggatttcttggtttgtgaaaacaggagaggagaaatatctcatacaagtgaaaggatactggagagagaaattacccatttctaaaaaaaaaccacactctgtcgtatctgtgttaatgttttctagcatgtactctggtttcaacagacacaaatttatatgttaacccagttttcttgccgttctgtaagtgttttattcttagtgtgatttttttccattgggatgtttttgattgaacttgttcattttgttttgcttgggaggaaaataaacaattttacttttttccttaaaaaaaaaaaaaaa

SEQ ID NO: 332 - protein, 406 aa, Homo sapiens
MAENGKNCDQRRVAMNKEHHNGNFTDPSSVNEKKRREREERQNIVLWRQPLITLQYFSLEILVILKEWTSKLWHRQSIVVSFLLLLAVLIATYYVEGVHQQYVQRIEKQFLLYAYWIGLGILSSVGLGTGLHTFLLYLGPHIASVTLAAYECNSVNFPEPPYPDQIICPDEEGTEGTISLWSIISKVRIEACMWGIGTAIGELPPYFMARAARLSGAEPDDEEYQEFEEMLEHAESAQDFASRAKLAVQKLVQKVGFFGILACASIPNPLFDLAGITCGHFLVPFWTFFGATLIGKAIIKMHIQKIFVIITFSKHIVEQMVAFIGAVPGIGPSLQKPFQEYLEAQRQKLHHKSEMGTPQGENWLSWMFEKLVVVMVCYFILSIINSMAQSYAKRIQQRLNSEEKTK

SEQ ID NO: 333 - DNA, 1854 bp, Homo sapiens
atggatctaaagacagcagtatttaacgcagctcgggatggcaaactccggcttctcaccaaattgttggcaagcaaatccaaagaggaggtttcctccttgatctctgaaaaaacaaatggggccacgccactcttgatggccgccaggtatgggcaccttgacatggtggaattcctcctagagcaatgcagtgcctccatagaagttgggggctccgtcaattttgatggcgaaaccattgagggggctccccctttatgggccgcttctgcagcaggacatctgaaggtggtccagtccttgttaaatcatggagcatctgtcaacaacacgactttaaccaattcaactcctcttcgagctgcgtgtttcgatggccatttggaaatagtgaagtaccttgtagaacacaaagctgatttggaagtgtcaaaccgacatgggcatacgtgcttgatgatttcatgttacaaaggacataaagagattgctcagtatttacttgaaaagggggcagatgttaatagaaaaagtgtcaaaggtaatactgcattgcatgattgtgcagaatctggaagtttggacatcatgaagatgcttcttatgtattgtgccaagatggaaaaggatggttatggaatgactccccttctctcagcaagtgtgactggtcacacaaatattgtggattttctgacacaccatgcacagaccagcaagacagaacgtattaatgctctagagcttctgggagctacatttgtagacaaaaaaagagatctgcttggggctttgaaatactggaaaaaggcaatgaacatgaggtacagtgataggactaatattattagtaaaccagtgccacagacactaataatggcttatgattatgccaaggaagtgaacagtgcagaagagctagaaggtcttattgctgatcctgatgagatgagaatgcaggcactattaatcagagaacgtattcttggtccttctcatcctgatacctcttactatattagatatagaggcgctgtctatgcagactctggaaatttcaaacgatgcatcaacctatggaagtatgctttggatatgcagcagagcaatttggatcctttaagcccaatgaccgccagcagcttattatcttttgcagaactattctcctttatgctacaggatagggctaaaggcctgctgggtactactgttacatttgatgatcttatgggcatactttgcaaaagcgtccttgaaatagagcgagctatcaaacaaactcagtgtccagctgacccattacagttaaataaggccctttctattattttgcacttaatttgcttgttagagaaagttccttgtactctagaacaagaccatttcaaaaagcagactatatacaggtttcttaagctgcatccaaggggaaagaataacttcagccctcttcatctggctgtggacaagaatactacatgtgtagggcggtaccctgtttgtaaatttccatctctacaagttactgcaatactgatagaatgtggtgctgatgtgaacgtcagagactcggatgacaacagtcccctgcatatcgctgctcttaacaaccatccagacatcatgaatctccttattaaatcaggtgcacattttgatgccacaaacttgcacaaacaaactgctagtgayttgctggatgagaaggaaatagctaaaaatttaatccagcctataaatcataccacattgcagtgtcttgctgctcgtgtcatagtgaatcatagaatatattataaagggcatatcccagaaaagctagagacttttgtttcccttcatagatga

SEQ ID NO: 334 - protein, 617 aa, Homo sapiens
MDLKTAVFNAARDGKLRLLTKLLASKSKEEVSSLISEKTNGATPLLMAARYGHLDMVEFLLEQCSASIEVGGSVNFDGETIEGAPPLWAASAAGHLKVVQSLLNHGASVNNTTLTNSTPLRAACFDGHLEIVKYLVEHKADLEVSNRHGHTCLMISCYKGHKEIAQYLLEKGADVNRKSVKGNTALHDCAESGSLDIMKMLLMYCAKMEKDGYGMTPLLSASVTGHTNIVDFLTHHAQTSKTERINALELLGATFVDKKRDLLGALKYWKKAMNMRYSDRTNIISKPVPQTLIMAYDYAKEVNSAEELEGLIADPDEMRMQALLIRERILGPSHPDTSYYIRYRGAVYADSGNFKRCINLWKYALDMQQSNLDPLSPMTASSLLSFAELFSFMLQDRAKGLLGTTVTFDDLMGILCKSVLEIERAIKQTQCPADPLQLNKALSIILHLICLLEKVPCTLEQDHFKKQTIYRFLKLHPRGKNNFSPLHLAVDKNTTCVGRYPVCKFPSLQVTAILIECGADVNVRDSDDNSPLHIAALNNHPDIMNLLIKSGAHFDATNLHKQTASDLLDEKEIAKNLIQPINHTTLQCLAARVIVNHRIYYKGHIPEKLETFVSLHR

SEQ ID NO: 335 - DNA, 3933 bp, Homo sapiens
cacgaggcagcactctcttcgtcgcttcggccagtgtgtcgggctgggccctgacaagccacctgaggagaggctcggagccgggcccggaccccggcgattgccgcccgcttctctctagtctcacgaggggtttcccgcctcgcacccccacctctggacttgcctttccttctcttctccgcgtgtggagggagccagcgcttaggccggagcgagcctgggggccgcccgccgtgaagacatcgcggggaccgattcaccatggagggcgccggcggcgcgaacgacaagaaaaagataagttctgaacgtcgaaaagaaaagtctcgagatgcagccagatctcggcgaagtaaagaatctgaagttttttatgagcttgctcatcagttgccacttccacataatgtgagttcgcatcttgataaggcctctgtgatgaggcttaccatcagctatttgcgtgtgaggaaacttctggatgctggtgatttggatattgaagatgacatgaaagcacagatgaattgcttttatttgaaagccttggatggttttgttatggttctcacagatgatggtgacatgatttacatttctgataatgtgaacaaatacatgggattaactcagtttgaactaactggacacagtgtgtttgattttactcatccatgtgaccatgaggaaatgagagaaatgcttacacacagaaatggccttgtgaaaaagggtaaagaacaaaacacacagcgaagcttttttctcagaatgaagtgtaccctaactagccgaggaagaactatgaacataaagtctgcaacatggaaggtattgcactgcacaggccacattcacgtatatgataccaacagtaaccaacctcagtgtgggtataagaaaccacctatgacctgcttggtgctgatttgtgaacccattcctcacccatcaaatattgaaattcctttagatagcaagactttcctcagtcgacacagcctggatatgaaattttcttattgtgatgaaagaattaccgaattgatgggatatgagccagaagaacttttaggccgctcaatttatgaatattatcatgctttggactctgatcatctgaccaaaactcatcatgatatgtttactaaaggacaagtcaccacaggacagtacaggatgcttgccaaaagaggtggatatgtctgggttgaaactcaagcaactgtcatatataacaccaagaattctcaaccacagtgcattgtatgtgtgaattacgttgtgagtggtattattcagcacgacttgattttctcccttcaacaaacagaatgtgtccttaaaccggttgaatcttcagatatgaaaatgactcagctattcaccaaagttgaatcagaagatacaagtagcctctttgacaaacttaagaaggaacctgatgctttaactttgctggccccagccgctggagacacaatcatatctttagattttggcagcaacgacacagaaactgatgaccagcaacttgaggaagtaccattatataatgatgtaatgctcccctcacccaacgaaaaattacagaatataaatttggcaatgtctccattacccaccgctgaaacgccaaagccacttcgaagtagtgctgaccctgcactcaatcaagaagttgcattaaaattagaaccaaatccagagtcactggaactttcttttaccatgccccagattcaggatcagacacctagtccttccgatggaagcactagacaaagttcacctgagcctaatagtcccagtgaatattgtttttatgtggatagtgatatggtcaatgaattcaagttggaattggtagaaaaactttttgctgaagacacagaagcaaagaacccattttctactcaggacacagatttagacttggagatgttagctccctatatcccaatggatgatgacttccagttacgttccttcgatcagttgtcaccattagaaagcagttccgcaagccctgaaagcgcaagtcctcaaagcacagttacagtattccagcagactcaaatacaagaacctactgctaatgccaccactaccactgccaccactgatgaattaaaaacagtgacaaaagaccgtatggaagacattaaaatattgattgcatctccatctcctacccacatacataaagaaactactagtgccacatcatcaccatatagagatactcaaagtcggacagcctcaccaaacagagcaggaaaaggagtcatagaacagacagaaaaatctcatccaagaagccctaacgtgttatctgtcgctttgagtcaaagaactacagttcctgaggaagaactaaatccaaagatactagctttgcagaatgctcagagaaagcgaaaaatggaacatgatggttcactttttcaagcagtaggaattggaacattattacagcagccagacgatcatgcagctactacatcactttcttggaaacgtgtaaaaggatgcaaatctagtgaacagaatggaatggagcaaaagacaattattttaataccctctgatttagcatgtagactgctggggcaatcaatggatgaaagtggattaccacagctgaccagttatgattgtgaagttaatgctcctatacaaggcagcagaaacctactgcagggtgaagaattactcagagctttggatcaagttaactgagctttttcttaatttcattcctttttttggacactggtggctcactacctaaagcagtctatttatattttctacatctaattttagaagcctggctacaatactgcacaaacttggttagttcaatttttgatcccctttctacttaatttacattaatgctcttttttagtatgttctttaatgctggatcacagacagctcattttctcagttttttggtatttaaaccattgcattgcagtagcatcattttaaaaaatgcacctttttatttatttatttttggctagggagtttatccctttttcgaattatttttaagaagatgccaatataatttttgtaagaaggcagtaacctttcatcatgatcataggcagttgaaaaatttttacaccttttttttcacattttacataaataataatgctttgccagcagtacgtggtagccacaattgcacaatatattttcttaaaaaataccagcagttactcatggaatatattctgcgtttataaaactagtttttaagaagaaattttttttggcctatgaaattgttaaacctggaacatgacattgttaatcatataataatgattcttaaatgctgtatggtttattatttaaatgggtaaagccatttacataatatagaaagatatgcatatatctagaaggtatgtggcatttatttggataaaattctcaattcagagaaatcatctgatgtttctatagtcactttgccagctcaaaagaaaacaataccctatgtagttgtggaagtttatgctaatattgtgtaactgatattaaacctaaatgttctgcctaccctgttggtataaagatattttgagcagactgtaaacaagaaaaaaaaaatcatgcattcttagcaaaattgcctagtatgttaatttgctcaaaatacaatgtttgattttatgcactttgtcgctattaacatcctttttttcatgtagatttcaataattgagtaattttagaagcattattttaggaatatatagttgtcacagtaaatatcttgttttttctatgtacattgtacaaatttttcattccttttgctctttgtggttggatctaacactaactgtattgttttgttacatcaaataaacatcttctgtggaaaaaaaaaaaaaaaaaaaa

SEQ ID NO: 336 - protein, 826 aa, Homo sapiens
MEGAGGANDKKKISSERRKEKSRDAARSRRSKESEVFYELAHQLPLPHNVSSHLDKASVMRLTISYLRVRKLLDAGDLDIEDDMKAQMNCFYLKALDGFVMVLTDDGDMIYISDNVNKYMGLTQFELTGHSVFDFTHPCDHEEMREMLTHRNGLVKKGKEQNTQRSFFLRMKCTLTSRGRTMNIKSATWKVLHCTGHIHVYDTNSNQPQCGYKKPPMTCLVLICEPIPHPSNIEIPLDSKTFLSRHSLDMKFSYCDERITELMGYEPEELLGRSIYEYYHALDSDHLTKTHHDMFTKGQVTTGQYRMLAKRGGYVWVETQATVIYNTKNSQPQCIVCVNYVVSGIIQHDLIFSLQQTECVLKPVESSDMKMTQLFTKVESEDTSSLFDKLKKEPDALTLLAPAAGDTIISLDFGSNDTETDDQQLEEVPLYNDVMLPSPNEKLQNINLAMSPLPTAETPKPLRSSADPALNQEVALKLEPNPESLELSFTMPQIQDQTPSPSDGSTRQSSPEPNSPSEYCFYVDSDMVNEFKLELVEKLFAEDTEAKNPFSTQDTDLDLEMLAPYIPMDDDFQLRSFDQLSPLESSSASPESASPQSTVTVFQQTQIQEPTANATTTTATTDELKTVTKDRMEDIKILIASPSPTHIHKETTSATSSPYRDTQSRTASPNRAGKGVIEQTEKSHPRSPNVLSVALSQRTTVPEEELNPKILALQNAQRKRKMEHDGSLFQAVGIGTLLQQPDDHAATTSLSWKRVKGCKSSEQNGMEQKTIILIPSDLACRLLGQSMDESGLPQLTSYDCEVNAPIQGSRNLLQGEELLRALDQVN

SEQ ID NO: 337 - DNA, 2349 bp, Homo sapiens
gcggcgggcggcagcatgtcggtggcggggctgaagaagcagttctacaaggcgagccagctggtcagtgagaaggtcggaggggccgaggggaccaagctggatgatgacttcaaagagatggagaagaaggtggatgtcaccagcaaggcggtgacagaagtgctggccaggaccatcgagtacctgcagcccaacccagcctcgcgggctaagctgaccatgctcaacacggtgtccaagatccggggccaggtgaagaaccccggctacccgcagtcggaggggcttctgggcgagtgcatgatccgccacgggaaggagctgggcggcgagtccaactttggtgacgcattgctggatgccggcgagtccatgaagcgcctggcagaggtgaaggactccctggacatcgaggtcaagcagaacttcattgaccccctccagaacctgtgcgagaaagacctgaaggagatccagcaccacctgaagaaactggagggccgccgcctggactttgactacaagaagaagcggcagggcaagatccccgatgaggagctacgccaggcgctggagaagttcgaggagtccaaggaggtggcagaaaccagcatgcacaacctcctggagactgacatcgagcaggtgagtcagctctcggccctggtggatgcacagctggactaccaccggcaggccgtgcagatcctggacgagctggcggagaagctcaagcgcaggatgcgggaagcttcctcacgccctaagcgggagtataagcccaagccccgggagccctttgaccttggagagcctgagcagtccaacgggggcttcccctgcaccacagcccccaagatcgcagcttcatcgtctttccgatcttccgacaagcccatccggacccctagccggagcatgccgcccctggaccagccgagctgcaaggcgctgtacgacttcgagcccgagaacgacggggagctgggcttccatgagggcgacgtcatcacgctgaccaaccagatcgatgagaactggtacgagggcatgctggacggccagtcgggcttcttcccgctcagctacgtggaggtgcttgtgcccctgccgcagtgactcacccgtgtccccgccccgcccctccgtccacactggccggcaccccctgctgggtctcctgcattccacggagcccctgctgccagggcggtgtctgagcctgccggcgccacctgggccccggcccttgaggtactccctgagcaggaccccacacttgggtgggggggcttatctgggtgggtggggatgcctgtttacactagcgctgactcccaacggtgacggctcccttccccactccatggcgccagcctcctcccccgctccccaacttctcgcccagctggccgaggcggggcaacactaaggtgctcttagaaacactaatgttcctctggggcagcccccacctccgtcctgacccgacgggggcccggcccactgcctaccctcgagtcccgcagccttaacaggatgggatcgagggtccccatggggtggctcagagataggaccctggttttaaatccctcccagcctggtgctggtgatgggccctggccctactccagggccaatgcacccccgcctcacacacgcactccttctcctcaaggccagggcagagggcctcaccgcctcccgggcctgctgtcagcttgcagcccggggacagaggccagctgggatctgcctgaggacagagaacatggtctcctgcagggccctgcctcccaagccccgccctcagaaagccaagtaccttttcagctttttaactgcccccatcccaacccagggaggcctgtgtcactctggcacaagctgccaccaccagccacccacacccaccccagcacacctcacacgggaccacagccgcgctgccgagggccaagcacaaaggttccagtgagcgcatgtcccagccctggtggccaggctccccttgctgagccgctgccacttcaccctgtgggaagtggccccagccatctcctctagaccaaggcaggcagccccgacatctgcttcctctatcgcccaatgcaaaatcgatgaaatggggagttctctgggccaggccacattcacattcccctccctctgtggtccagtgaagctccggaccccaggctctgctctgccctgccctgcacccccctcgtcagaagtacatgaggggcgcagagatgagcacacagctttgggcacggtccagggcaaactgaaatgtacgcctgaattttgtaaacagaagtattaaatgtctctttctac

SEQ ID NO: 338 - protein, 368 aa, Homo sapiens
MSVAGLKKQFYKASQLVSEKVGGAEGTKLDDDFKEMEKKVDVTSKAVTEVLARTIEYLQPNPASRAKLTMLNTVSKIRGQVKNPGYPQSEGLLGECMIRHGKELGGESNFGDALLDAGESMKRLAEVKDSLDIEVKQNFIDPLQNLCEKDLKEIQHHLKKLEGRRLDFDYKKKRQGKIPDEELRQALEKFEESKEVAETSMHNLLETDIEQVSQLSALVDAQLDYHRQAVQILDELAEKLKRRMREASSRPKREYKPKPREPFDLGEPEQSNGGFPCTTAPKIAASSSFRSSDKPIRTPSRSMPPLDQPSCKALYDFEPENDGELGFHEGDVITLTNQIDENWYEGMLDGQSGFFPLSYVEVLVPLPQ

SEQ ID NO: 339 - DNA, 1836 bp, Homo sapiens
ggcgctgggcggctgcggcgcgcggtgcgcggtgcgtagtctggagctatggtggtggtggcagccgcgccgaacccggccgacgggacccctaaagttctgcttctgtcggggcagcccgcctccgccgccggagccccggccggccaggccctgccgctcatggtgccagcccagagaggggccagcccggaggcagcgagcggggggctgccccaggcgcgcaagcgacagcgcctcacgcacctgagccccgaggagaaggcgctgaggaggaaactgaaaaacagagtagcagctcagactgccagagatcgaaagaaggctcgaatgagtgagctggaacagcaagtggtagatttagaagaagagaaccaaaaacttttgctagaaaatcagcttttacgagagaaaactcatggccttgtagttgagaaccaggagttaagacagcgcttggggatggatgccctggttgctgaagaggaggcggaagccaaggggaatgaagtgaggccagtggccgggtctgctgagtccgcagcactcagactacgtgcacctctgcagcaggtgcaggcccagttgtcacccctccagaacatctccccatggattctggcggtattgactcttcagattcagagtctgatatcctgttgggcattctggacaacttggacccagtcatgttcttcaaatgcccttccccagagcctgccagcctggaggagctcccagaggtctacccagaaggacccagttccttaccagcctccctttctctgtcagtggggacgtcatcagccaagctggaagccattaatgaactaattcgttttgaccacatatataccaagcccctagtcttagagataccctctgagacagagagccaagctaatgtggtagtgaaaatcgaggaagcacctctcagcccctcagagaatgatcaccctgaattcattgtctcagtgaaggaagaacctgtagaagatgacctcgttccggagctgggtatctcaaatctgctttcatccagccactgcccaaagccatcttcctgcctactggatgcttacagtgactgtggatacgggggttccctttccccattcagtgacatgtcctctctgcttggtgtaaaccattcttgggaggacacttttgccaatgaactctttccccagctgattagtgtctaaggaatgatccaatactgttgcccttttccttgactattacactgcctggaggatagcagagaagcctgtctgtacttcattcaaaaagccaaaatagagagtatacagtcctagagaattcctctatttgttcagatctcatagatgacccccaggtattgtcttttgacatccagcagtccaaggtattgagacatattactggaagtaagaaatattactataattgagaactacagcttttaagattgtacttttatcttaaaagggtggtagttttccctaaaatacttattatgtaagggtcattagacaaatgtcttgaagtagacatggaatttatgaatggttctttatcatttctcttccccctttttggcatcctggcttgcctccagttttaggtcctttagtttgcttctgtaagcaacgggaacacctgctgagggggctctttccctcatgtatacttcaagtaagatcaagaatcttttgtgaaattatagaaatttactatgtaaatgcttgatggaattttttcctgctagtgtagcttctgaaaggtgctttctccatttatttaaaactacccatgcaattaaaaggtacaatgcaaaaaaaaaaaaaaaaa

SEQ ID NO: 340 - protein, 261 aa, Homo sapiens
MVVVAAAPNPADGTPKVLLLSGQPASAAGAPAGQALPLMVPAQRGASPEAASGGLPQARKRQRLTHLSPEEKALRRKLKNRVAAQTARDRKKARMSELEQQVVDLEEENQKLLLENQLLREKTHGLVVENQELRQRLGMDALVAEEEAEAKGNEVRPVAGSAESAALRLRAPLQQVQAQLSPLQNISPWILAVLTLQIQSLISCWAFWTTWTQSCSSNALPQSLPAWRSSQRSTQKDPVPYQPPFLCQWGRHQPSWKPLMN

SEQ ID NO: 341 - DNA, 2503 bp, Homo sapiens
ggcacgagggagaaaggagagaaaggaaagcgcgaggagccgccgccaccaccagcgcagcagtcctggagctgtgaggagattcgggccgtcaccctgcctcccctgcgtcccgccaccggccgcttctgtcctcggacccattccaacaatctcgtaaaacatggtggattactatgaagttctaggcgtgcagagacatgcctcacccgaggatattaaaaaggcatatcggaaactggcactgaagtggcatccagataaaaatcctgagaataaagaagaagcagagagaaaattcaagcaagtagcggaggcatatgaagtgctgtcggatgctaagaaacgggacatctatgacaaatatggcaaagaaggattaaatggtggaggaggaggtggaagtcattttgacagtccatttgaatttggcttcacattccgtaacccagatgatgtcttcagggaattttttggtggaagggacccattttcatttgacttctttgaagacccttttgaggacttctttgggaatcgaaggggtccccgaggaagcagaagccgagggacggggtcgtttttctctgcgttcagtggatttccgtcttttggaagtggattttcttcttttgatacaggatttacttcatttgggtcactaggtcacgggggcctcacttcattctcttccacgtcatttggtggtagtggcatgggcaacttcaaatcgatatcaacttcaactaaaatggttaatggcagaaaaatcactacaaagagaattgtcgagaacggtcaagaaagagtagaagttgaagaagatggccagttaaagtccttaacaataaatggtgtggccgacgacgatgccctcgctgaggagcgcatgcggagaggccagaacgccctgccagcccagcctgccggcctccgcccgccgaagccgccccggcctgcctcgctgctgagacacgcgcctcactgtctctctgaggaggagggcgagcaggaccgacctcgggcacccgggccctgggaccccctcgcgtccgcagcaggattgaaagaaggtggcaagaggaagaagcagaagcagagagaggagtcgaagaagaagaagtcgaccaaaggcaatcactagaccggacttgaggcacgcggtgcacccccagacgctggcgctccaccgtgctcggcatgcggtcgtgcacacgcgctaggtagcagcgtcggtcaggactgtctcgaggccacactcgctcggcaggattatgcgatcacggatcagtcagagcagggtcaggagacggggctgacggcacgggtggcggggacagacgtttgggacttggccgcgactctctgcttctctccagctctcaatctgctgcattttcctctagtgcttccggatcctcttcattcttttcggctactcaaccactccgcatgctgctggaatatttctggctttagaagtacaggagggcgcagatggctaactgagtaacattcatgaaatgaggctttctgtggcggcgtagtgtttggaattagaaggtaattcagtagagtgtaacttagagaatattgcaagtgacacattgaatcctgcccgtcagggcaccttttcctcagagcaatccggccacacgaatagaaggctgtcgtgaatcacatcagatgtaaaatcattccttctgtttactcttttaattttcatcctttgcaggtagtgcaaattcaacttcaaatatggtgtaggttttgctagattccatatttttttcttggatttttgctaattatttttagcaaaaaatttttgctcagtggcaccctccctagtgtccatgggttagggccatgctggggaaaacgggccggtatttacacacgcgcaaaacacccagagacggcacaaggaggttgaactcatgtttcagttcgcgaacattgactccttacgaaagtcacttcattctaactagatgcgcccacttccggtcattatttcgtttgcatgatgtattgcttcttcacgttttgtttttattgagcacggagtagaattccagggctgccttgacttcttccctgcatgctccctcccagtgactttccttccctttcacatgaggatctgccgttcatgttgctttctcctttgtcctcttggacttgagggcattgtgaaaagctttgctgtgatttaaaaatgccagcaattttaatctagcagtgttgaagctgggaattttttggcgcaatccatgtagcagtgacccaggcttgggagccagaaacaagtgtgacctgggattttatttaacacaactgttgccaaagagttggctttgtttatttggttttggcggggagaggagtggtatttgatgctttctgtggacaatgtaaccctaaacacatcatgtattttaaatgccacctacataaataaaacataagcatattgaatacaaaaaaaaaaaaaaaaaaa

SEQ ID NO: 342 - protein, 326 aa, Homo sapiens
MVDYYEVLGVQRHASPEDIKKAYRKLALKWHPDKNPENKEEAERKFKQVAEAYEVLSDAKKRDIYDKYGKEGLNGGGGGGSHFDSPFEFGFTFRNPDDVFREFFGGRDPFSFDFFEDPFEDFFGNRRGPRGSRSRGTGSFFSAFSGFPSFGSGFSSFDTGFTSFGSLGHGGLTSFSSTSFGGSGMGNFKSISTSTKMVNGRKITTKRIVENGQERVEVEEDGQLKSLTINGVADDDALAEERMRRGQNALPAQPAGLRPPKPPRPASLLRHAPHCLSEEEGEQDRPRAPGPWDPLASAAGLKEGGKRKKQKQREESKKKKSTKGNH

SEQ ID NO: 343 - DNA, 1697 bp, Homo sapiens
ggatcgaggggactctgaccacagcctgtggctgggaagggagacagaggcggcggcggctcaggggaaacgaggctgcagtggtggtagtaggaagatgtcgggcgaggacgagcaacaggagcaaactatcgctgaggacctggtcgtgaccaagtataagatggggggcgacatcgccaacagggtacttcggtccttggtggaagcatctagctcaggtgtgtcggtactcagcctgtgtgagaaaggtgatgccatgattatggaagaaacagggaaaatcttcaagaaagaaaaggaaatgaagaaaggtattgcttttcccaccagcatttcggtaaataactgtgtatgtcacttctcccctttgaagagcgaccaggattatattctcaaggaaggtgacttggtaaaaattgaccttggggtccatgtggatggcttcatcgctaatgtagctcacacttttgtggttgatgtagctcaggggacccaagtaacagggaggaaagcagatgttattaaggcagctcacctttgtgctgaagctgccctacgcctggtcaaacctggaaatcagaacacacaagtgacagaagcctggaacaaagttgcccactcatttaactgcacgccaatagaaggtatgctgtcacaccagttgaagcagcatgtcatcgatggagaaaaaaccattatccagaatcccacagaccagcagaagaaggaccatgaaaaagctgaatttgaggtacatgaagtatatgctgtggatgttctcgtcagctcaggagagggcaaggccaaggatgcaggacagagaaccactatttacaaacgagacccctctaaacagtatggactgaaaatgaaaacttcacgtgccttcttcagtgaggtggaaaggcgttttgatgccatgccgtttactttaagagcatttgaagatgagaagaaggctcggatgggtgtggtggagtgcgccaaacatgaactgctgcaaccatttaatgttctctatgagaaggagggtgaatttgttgcccagtttaaatttacagttctgctcatgcccaatggccccatgcggataaccagtggtcccttcgagcctgacctctacaagtctgagatggaggtccaggatgcagagctaaaggccctcctccagagttctgcaagtcgaaaaacccagaaaaagaaaaaaaagaaggcctccaagactgcagagaatcccaccagtggggaaacattagaagaaaatgaagctggggactgaggtgcgtcccatctccccagcttgctgctcctgcctcatccccttcccaccaaaccccagactctgtgaagtgcagttcttctccacctaggaccgccagcagagcggggggatctccctgcccccaccccagttccccaacccactcccttccaacaacaaccagctccaactgactctggtcttgggaggtgaggcttcccaaccacggaagactactttaaacgaaaaaaagaaattgaataataaaatcaggagtcaaaattcatcgtcttcaaggcccctctttctagccttttctactactctctgcttggtcaaggtttgtgccccactacagaacagggctaaattagccaccaccactgaaaactcagccgaatttttttataccactctgacgtcagcatttttt

SEQ ID NO: 344 - protein, 394 aa, Homo sapiens
MSGEDEQQEQTIAEDLVVTKYKMGGDIANRVLRSLVEASSSGVSVLSLCEKGDAMIMEETGKIFKKEKEMKKGIAFPTSISVNNCVCHFSPLKSDQDYILKEGDLVKIDLGVHVDGFIANVAHTFVVDVAQGTQVTGRKADVIKAAHLCAEAALRLVKPGNQNTQVTEAWNKVAHSFNCTPIEGMLSHQLKQHVIDGEKTIIQNPTDQQKKDHEKAEFEVHEVYAVDVLVSSGEGKAKDAGQRTTIYKRDPSKQYGLKMKTSRAFFSEVERRFDAMPFTLRAFEDEKKARMGVVECAKHELLQPFNVLYEKEGEFVAQFKFTVLLMPNGPMRITSGPFEPDLYKSEMEVQDAELKALLQSSASRKTQKKKKKKASKTAENPTSGETLEENEAGD

SEQ ID NO: 345 - DNA, 2540 bp, Homo sapiens
acgagacgaagacggaaccggagccggttgcgggcagtggacgcggttctgccgagagccgaagatggcagtgaacgtatactcaacgtcagtgaccagtgataacctaagtcgacatgacatgctggcctggatcaatgagtctctgcagttgaatctgacaaagatcgaacagttgtgctcaggggctgcgtattgtcagtttatggacatgctgttccctggctccattgccttgaagaaagtgaaattccaagctaagctagaacacgagtacatccagaacttcaaaatactacaagcaggttttaagagaatgggtgttgacaaaataattcctgtggacaaattagtaaaaggaaagtttcaggacaattttgaattcgttcagtggttcaagaagtttttcgatgcaaactatgatggaaaagactatgaccctgtggctgccagacaaggtcaagaaactgcagtggctccttcccttgttgctccagctctgaataaaccgaagaaacctctcacttctagcagtgcagctccccagaggcccatctcaacacagagaaccgctgcggctcctaaggctggccctggtgtggtgcgaaagaaccctggtgtgggcaacggagacgacgaggcagctgagttgatgcagcaggtcaacgtattgaaacttactgttgaagacttggagaaagagagggatttctacttcggaaagctacggaacattgaattgatttgccaggagaacgagggggaaaacgaccctgtattgcagaggattgtagacattctgtatgccacagatgaaggctttgtgatacctgatgaagggggcccacaggaggagcaagaagagtattaacagcctggaccagcagagcaacatcggaattcttcactccaaatcatgtgcttaactgtaaaatactcccttttgttatccttagaggactcactggtttcttttcataagcaaaaagtacctcttcttaaagtgcactttgcagacgtttcactccttttccaataagtttgagttaggagcttttaccttgtagcagagcagtattaacatctagttggttcacctggaaaacagagaggctgaccgtggggctcaccatgcggatgcgggtcacactgaatgctggagagatgtatgtaatatgctgaggtggcgacctcagtggagaaatgtaaagactgaattgaattttaagctaatgtgaaatcagagaatgttgtaataagtaaatgccttaagagtatttaaaatatgcttccacatttcaaaatataaaatgtaacatgacaagagattttgcgtttgacattgtgtctgggaaggaagggccagaccttggaacctttggaacctgctgtcaacaggtcttacagggctgcttgaaccctcataggcctaggctttggtctaaaaggaacatttaaaaagttgccctgtaaagttatttggtgtcattgaccaattgcatcccagctaaaaagcaagaggcatcgttgcctggataatagaggatgtgtttcagccctgagatgttacagttgaagagcttggtttcattgagcatttctctatttttccagttatcccgaaatttctatgtattattttttggggaagtgaggtgtgcccagttttttaatctaacaactacttttggggacttgcccacatctctgggatttgaatggggattgtatcccattttactgtcttttaggtttacatttaccacgtttctcttctctgctccccttgcccactgggactcctctttggctccttgaagtttgctgcttagagttggaagtgcagcaggcaggtgatcatgctgcaagttctttctggacctctggcaaagggagtggtcagtgaaggccatcgttaccttgggatctgccaggctggggtgttttcggtatctgctgttcacagctctccactgtaatccgaatactttgccagtgcactaatctctttggagataaaattcattagtgtgttactaaatgttaattttcttttgcggaaaatacagtaccgtgtctgaattaattattaatatttaaaatacttcattccttaactctccctcatttgctttgcccacagcctattcagttcctttgtttggcaggattctgcaaaatgtgtctcacccactactgagattgttcagcccctgatgtatttgtattgatttgtttctggtggtagcttgtcctgaaatgtgtgtagaaagcaagtattttatgataaaaatgttgtgtagtgcatgctctgtgtggaattcagaggaaaacccagattcagtgattaacaatgccaaaaaatgcaagtaactagccattgttcaaatgacagtggtgctatttctcttttgtggccttttagacttttgttgccctaaaattccattttattgggaacccattttccacctggtctttcttgacagggtttttttctactttaaacagtttctaaataaaattctgtatttcaaaaa

SEQ ID NO: 346 - protein, 268 aa, Homo sapiens
MAVNVYSTSVTSDNLSRHDMLAWINESLQLNLTKIEQLCSGAAYCQFMDMLFPGSIALKKVKFQAKLEHEYIQNFKILQAGFKRMGVDKIIPVDKLVKGKFQDNFEFVQWFKKFFDANYDGKDYDPVAARQGQETAVAPSLVAPALNKPKKPLTSSSAAPQRPISTQRTAAAPKAGPGVVRKNPGVGNGDDEAAELMQQVNVLKLTVEDLEKERDFYFGKLRNIELICQENEGENDPVLQRIVDILYATDEGFVIPDEGGPQEEQEEY

SEQ ID NO: 347 - DNA, 2346 bp, Homo sapiens
cggaacgtggttggggaggggggggtgggggggactctagacagctgaggcgcgaaagcatgagtcctcggctcttcctcctccttctccgggacccgctctctgcctccctctccaacgcccggatgatctgagccgcgagggcgccgacagccgggggcccggacgcagcccggctcctcccctcctccgccccttccccagcctgacctggcccgccgctgcagcggtgacccctcccccggctgccgccgtcgccgccgcggtgaccccctccccggctgccgccgccgccgcctcggccgaccagggacctgcccgcctgcggctgctccggacctagaggatcaagacataatgggagcatttttagacaagccaaagatggaaaagcataatgcccaggggcagggtaatgggttgcgatatgggctaagcagcatgcaaggctggcgtgttgaaatggaggatgcacatacggctgtgatcggtttgccaagtggacttgaatcgtggtcattctttgctgtgtatgatgggcatgctggttctcaggttgccaaatactgctgtgagcatttgttagatcacatcaccaataaccaggattttaaagggtctgcaggagcaccttctgtggaaaatgtaaagaatggaatcagaacaggttttctggagattgatgaacacatgagagttatgtcagagaagaaacatggtgcagatagaagtgggtcaacagctgtaggtgtcttaatttctccccaacatacttatttcattaactgtggagactcaagaggtttactttgtaggaacaggaaagttcatttcttcacacaagatcacaaaccaagtaatccgctggagaaagaacgaattcagaatgcaggtggctctgtaatgattcagcgtgtgaatggctctctggctgtatcgagggcccttggggattttgattacaaatgtgtccatggaaaaggtcctactgagcagcttgtctcaccagagcctgaagtccatgatattgaaagatctgaagaagatgatcagttcattatccttgcatgtgatggtatctgggatgttatgggaaatgaagagctctgtgattttgtaagatccagacttgaagtcactgatgaccttgagaaagtttgcaatgaagtagtcgacacctgtttgtataagggaagtcgagacaacatgagtgtgattttgatctgttttccaaatgcacccaaagtatcgccagaagcagtgaagaaggaggcagagttggacaagtacctggaatgcagagtagaagaaatcataaagaagcagggggaaggcgtccccgacttagtccatgtgatgcgcacattagcgagtgagaacatccccagcctcccaccagggggtgaattggcaagcaagaggaatgttattgaagccgtttacaatagactgaatccttacaaaaatgacgacactgactctacatcaacagatgatatgtggtaaaactgctcatctagccatggagtttaccttcacctccaaaggagagtacagctcaactttgttgaaacttttaacatccatcctcaactttaaggaaggggatatgacatgggtgagaatgattacatcagagaacttcagcagtacaacagctagcccagaactgattttttttttttttttttttgtaaatttgagacttatgtaagcgtgatttcaaaccataattcgtgttgtaaatcagactccagcaatttttgttgtatgattttgtttttttgtaaagtgtaattgtccttgtacaaaatgctcatatttaattatgaactgctttaaatcactatcaaagttacaagaaatgtttggcttattgtgtgatgcaacagatatatagccctttcaagtcatgttgtgtttggacttggggttggaacagggagagcagcagccatgtcagctacacgctcaaatgtgcagatgattatggaaaataacctcaaaatcttacaaagctgaacatccaaggagttattgaaaactatcttaaatgttcttggtaggggagttggcattgttgataaagccagtcccttcatttaactgtctttcaggatgttccttcgttgtttccatgagtattgcaggtaataatacagtgtgttccataagaatctcaatcttggggctaaatgccttgtttctttgcacctcttttcaagtccttacatttaattactaattgataagcagcagcttcctacatatagtaggaaactgccacatttttgctatcatgattggctgggcctgctgctgttcctagtaagatattctgaattc

SEQ ID NO: 348 - protein, 382 aa, Homo sapiens
MGAFLDKPKMEKHNAQGQGNGLRYGLSSMQGWRVEMEDAHTAVIGLPSGLESWSFFAVYDGHAGSQVAKYCCEHLLDHITNNQDFKGSAGAPSVENVKNGIRTGFLEIDEHMRVMSEKKHGADRSGSTAVGVLISPQHTYFINCGDSRGLLCRNRKVHFFTQDHKPSNPLEKERIQNAGGSVMIQRVNGSLAVSRALGDFDYKCVHGKGPTEQLVSPEPEVHDIERSEEDDQFIILACDGIWDVMGNEELCDFVRSRLEVTDDLEKVCNEVVDTCLYKGSRDNMSVILICFPNAPKVSPEAVKKEAELDKYLECRVEEIIKKQGEGVPDLVHVMRTLASENIPSLPPGGELASKRNVIEAVYNRLNPYKNDDTDSTSTDDMW

SEQ ID NO: 349 - DNA, 2181 bp, Homo sapiens
agagagccgagctctggagcctcagcgagcggaggaggaggcgcagggccgacggccgagtactgcggtgagagccagcgggccagcgccagcctcaacagccgccagaagtacacgaggaaccggcggcggcgtgtgcgtgtaggcccgtgtgcgggcggcggcgcgggaggagcgcggagcggcagccggctggggcgggtggcatcatggacgagaaggtgttcaccaaggagctggaccagtggatcgagcagctgaacgagtgcaagcagctgtccgagtcccaggtcaagagcctctgcgagaaggctaaagaaatcctgacaaaagaatccaacgtgcaagaggttcgatgtccagttactgtctgtggagatgtgcatgggcaatttcatgatctcatggaactgtttagaattggtggcaaatcaccagatacaaattacttgtttatgggagattatgttgacagaggatattattcagttgaaacagttacactgcttgtagctcttaaggttcgttaccgtgaacgcatcaccattcttcgagggaatcatgagagcagacagatcacacaagtttatggtttctatgatgaatgtttaagaaaatatggaaatgcaaatgtttggaaatattttacagatctttttgactatcttcctctcactgccttggtggatgggcagatcttctgtctacatggtggtctctcgccatctatagatacactggatcatatcagagcacttgatcgcctacaagaagttccccatgagggtccaatgtgtgacttgctgtggtcagatccagatgaccgtggtggttggggtatatctcctcgaggagctggttacacctttgggcaagatatttctgagacatttaatcatgccaatggcctcacgttggtgtctagagctcaccagctagtgatggagggatataactggtgccatgaccggaatgtagtaacgattttcagtgctccaaactattgttatcgttgtggtaaccaagctgcaatcatggaacttgacgatactctaaaatactctttcttgcagtttgacccagcacctcgtagaggcgagccacatgttactcgtcgtaccccagactacttcctgtaatgaaattttaaacttgtacagtattgccatgaaccatatatcgacctaatggaaatgggaagagcaacagtaactccaaagtgtcagaaaatagttaacattcaaaaaacttgttttcacatggaccaaaagatgtgccatataaaaatacaaagcctcttgtcatcaacagccgtgaccactttagaatgaaccagttcattgcatgctgaagcgacattgttggtcaagaaaccagtttctggcatagcgctatttgtagttacttttgctttctctgagagactgcagataataagatgtaaacattaacacctcgtgaatacaatttaacttccatttagctatagctttactcagcatgactgtagataaggatagcagcaaacaatcattggagcttaatgaacatttttaaaaataattaccaaggcctcccttctacttgtgagttttgaaattgttctttttattttcagggataccgtttaatttaattatatgatttgtctgcactcagtttattccctactcaaatctcagccccatgttgttctttgttattgtcagaacctggtgagttgttttgaacagaactgttttttccccttcctgtaagacgatgtgactgcacaagagcactgcagtgtttttcataataaacttgtgaactaagaactgagaaggtcaaattttaattgtatcaatgggcaagactggtgctgtttattaaaaaagttaaatcaattgagtaaattttagaatttgtagacttgtaggtaaaataaaaatcaagggcactacataacctctctggtaactccttgacattcttcagattaacttcaggatttatttgtatttcacatattacaatttgtcacattgttggtgtgcactttgtgggttcttcctgcatattaacttgtttgtaagaaaggaaatctgtgctgcttcagtaagacttaattgtaaaaccatataacttgagatttaagtctttgggttgtgttttaataaaacagcatgttttcaggtagag

SEQ ID NO: 350 - protein, 309 aa, Homo sapiens
MDEKVFTKELDQWIEQLNECKQLSESQVKSLCEKAKEILTKESNVQEVRCPVTVCGDVHGQFHDLMELFRIGGKSPDTNYLFMGDYVDRGYYSVETVTLLVALKVRYRERITILRGNHESRQITQVYGFYDECLRKYGNANVWKYFTDLFDYLPLTALVDGQIFCLHGGLSPSIDTLDHIRALDRLQEVPHEGPMCDLLWSDPDDRGGWGISPRGAGYTFGQDISETFNHANGLTLVSRAHQLVMEGYNWCHDRNVVTIFSAPNYCYRCGNQAAIMELDDTLKYSFLQFDPAPRRGEPHVTRRTPDYFL

SEQ ID NO: 351 - DNA, 428 bp, Homo sapiens
atgtctcttgtcagctgtctttcagaagacctggtggggcaagtccgtgggcatcatgttgaccgagctggagaaagccttgaactctatcatcgacgtctaccacaagtactccctgataaaggggaatttccatgccgtctacagggatgacctgaagaaattgctagagaccgagtgtcctcagtatatcaggaaaaagggtgcagacgtctggttcaaagagttggatatcaacactgatggtgcagttaacttccaggagttcctcattctggtgataaagatgggcgtggcagcccacaaaaaaagccatgaagaaagccacaaagagtagctgagttactgggcccagaggctgggcccctggacatgtacctgcagaataataaagtcatcaatacctcaaaaaaaaaaaaaaaaaaaaa

SEQ ID NO: 352 - protein, 93 aa, Homo sapiens
MLTELEKALNSIIDVYHKYSLIKGNFHAVYRDDLKKLLETECPQYIRKKGADVWFKELDINTDGAVNFQEFLILVIKMGVAAHKKSHEESHKE

SEQ ID NO: 353 - DNA, 938 bp, Homo sapiens
caagagagagagagaggtgcaagccccaaagcgagcgacatgtccctttggggagcagtccctctgcaccccagagtgaggaggacgcaggggtcagaggtggctacagggcaggcagaggaggcacctgtagggggtggtgggctggtggcccaggagaagtcaggaagggagcccagctggtgacaagagagcccagaggtgcctggggctgagtgtgagagcccggaagatttcagccatgcctcacagctccgacagcagtgactccagcttcagccgctctcctccccctggcaaacaggactcatctgatgatgtgagaagagttcagaggagggagaaaaatcgtattgccgcccagaagagccgacagaggcagacacagaaggccgacaccctgcacctggagagcgaagacctggagaaacagaacgcggctctacgcaaggagatcaagcagctcacagaggaactgaagtacttcacgtcggtgctgaacagccacgagcccctgtgctcggtgctggccgccagcacgccctcgccccccgaggtggtgtacagcgcccacgcattccaccaacctcatgtcagctccccgcgcttccagccctgagcttccgatgcggggagagcagagcctcgggaggggcacacagactgtggcagagctgcgcccatcccgcagaggcccctgtccacctggagacccggagacagaggcctggacaaggagtgaacacgggaactgtcacgactggaagggcgtgaggcctcccagcagtgccgcagcgtttcgaggggcgtgtgctggaccccaccactgtgggttgcaggcccaatgcagaagagtattaagaaagatgctcaagtcccatggcacagagcaaggcgggcagggaacggttatttttctaaataaatgctttaaaaga

SEQ ID NO: 354 - protein, 125 aa, Homo sapiens
MPHSSDSSDSSFSRSPPPGKQDSSDDVRRVQRREKNRIAAQKSRQRQTQKADTLHLESEDLEKQNAALRKEIKQLTEELKYFTSVLNSHEPLCSVLAASTPSPPEVVYSAHAFHQPHVSSPRFQP

SEQ ID NO: 355 - DNA, 3448 bp, Homo sapiens
gttcagcgccggcgccggtgtgcgagccgcggcagagtgaggcaggcaacccgaggtgcggagcgacctgcggaggctgagccccgctttctcccagggtttcttatcagccagccgccgctgtccccgggggagtaggaggctcctgacaggccgcggctgtctgtgtgtccttctgagtgtcagaggaacggccagaccccgcgggccggagcagaacgcggccagggcagaaagcggcggcaggagaagcaggcagggggccggaggacgcagaccgagacccgaggcggaggcggaccgcgagccggccatgtcggtggtggggttggacgtgggctcgcagagctgctacatcgcggtagcccgggccgggggcatcgagaccatcgccaatgagttcagcgaccggtgcaccccgtcagtcatatcatttggatcaaaaaatagaacaatcggagttgcagccaaaaatcagcaaatcactcatgcaaacaatacggtgtctaacttcaaaagatttcatggccgagcattcaacgaccccttcattcaaaaggagaaggaaaacttgagttacgatttggttccattgaaaaatggtggagttggaataaaggtaatgtacatgggtgaagaacatctatttagtgtggagcagataacagccatgttgttgactaagctgaaggaaactgctgaaaacagcctcaagaaaccagtaacagattgtgttatttcagtcccctccttctttacagatgctgagaggcgatctgtgttagatgctgcacagattgttggcctaaactgtttaagacttatgaatgacatgacagctgttgctttgaattacggaatttataagcaggatctcccaagcctggatgagaaacctcggatagtggtttttgttgatatgggacattcagcttttcaagtgtctgcttgtgcttttaacaagggaaaattgaaggtactgggaacagcttttgatcctttcttaggaggaaaaaacttcgatgaaaagttagtggaacatttctgtgcagaatttaaaactaagtacaagttggatgcaaaatccaaaatacgagcactcctacgtctgtatcaggaatgtgaaaaactgaaaaagctaatgagctctaacagcacagaccttccactgaatatcgaatgctttatgaatgataaagatgtttccggaaagatgaacaggtcacaatttgaagaactctgtgctgaacttctgcaaaagatagaagtacccctttattcactgttggaacaaactcatctcaaagtagaagatgtgagtgcagttgagattgttggaggcgctacacgaattccagctgtgaaggaaagaattgccaaattctttggaaaagatattagcacaacactcaatgcagatgaagcagtagccagaggatgtgcattacagtgtgcaatactttccccggcatttaaagttagagaattttccgtcacagatgcagttccttttccaatatctctgatctggaaccatgattcagaagatactgaaggtgttcatgaagtctttagtcgaaaccatgctgctcctttctccaaagttctcacctttctgagaagggggccttttgagctagaagctttctattctgatccccaaggagttccatatccagaagcaaaaataggccgctttgtagttcagaatgtttctgcacagaaagatggagaaaaatctagagtaaaagtcaaagtgcgagtcaacacccatggcattttcaccatctctacggcatctatggtggagaaagtcccaactgaggagaatgaaatgtcttctgaagctgacatggagtgtctgaatcagagaccaccagaaaacccagacactgatgcaaatgaaaaaaaagttgaccagcctccagaagctaaaaagcccaaaataaaggtggtgaatgttgagctgcctattgaagccaacttggtctggcagttagggaaagaccttcttaacatgtatattgagacagagggtaagatgataatgcaagataaattggaaaaagaaaggaatgatgctaaaaatgcagttgaggaatatgtgtatgagttcagagacaagctgtgtggaccatatgaaaaatttatatgtgagcaggatcatcaaaattttttgagactcctcacagaaactgaagactggctgtatgaagaaggagaggaccaagctaaacaagcatatgttgacaagttggaagaattaatgaaaattggcactccagttaaagttcggtttcaggaagctgaagaacggccaaaaatgtttgaagaactaggacagaggctgcagcattatgccaagatagcagctgacttcagaaataaggatgagaaatacaaccatattgatgagtctgaaatgaaaaaagtggagaagtctgttaatgaagtgatggaatggatgaataatgtcatgaatgctcaggctaaaaagagtcttgatcaggatccagttgtacgtgctcaggaaattaaaacaaaaatcaaggaattgaacaacacatgtgaacccgttgtaacacaaccgaaaccaaaaattgaatcacccaaactggaaagaactccaaatggcccaaatattgataaaaaggaagaagatttagaagacaaaaacaattttggtgctgaacctccacatcagaatggtgaatgttaccctaatgagaaaaattctgttaatatggacttggactagataaccttaaattggcctattccttcaattaataaaatatttttgccatagtatgtgactctacataacatactgaaactatttatattttcttttttaaggatatttagaaattttgtgtattatatggaaaaagaaaaaaagcttaagtctgtagtctttatgatcctaaaagggaaaattgccttggtaactttcagattcctgtggaattgtgaattcatactaagctttctgtgcagtctcaccatttgcatcactgaggatgaaactgacttttgtcttttggagaaaaaaaactgtactgttgttcaagagggctgtgattaaaatctttaagcatttgttcctgccaaggtagttttcttgcattttgctctccattcagcatgtgtgtgggtgtggatgtttataaacaagactaagtctgacttcataagggctttctaaaaccatttctgtccaagagaaaatgactttttgctttgatattaaaaattcaatgagtaaaacaaaagctagtcaaatgtgttagcagcatgcagaacaaaaactttaaactttctctctcactatacagtatattgtcaatgtgaaagtgtggaatggaagaaatgtcgatcctgttgtaactgattgtgaacacttttatgagctttaaaataaagttcatcttatggtgtcatttct

SEQ ID NO: 356 - protein, 814 aa, Homo sapiens
MSVVGLDVGSQSCYIAVARAGGIETIANEFSDRCTPSVISFGSKNRTIGVAAKNQQITHANNTVSNFKRFHGRAFNDPFIQKEKENLSYDLVPLKNGGVGIKVMYMGEEHLFSVEQITAMLLTKLKETAENSLKKPVTDCVISVPSFFTDAERRSVLDAAQIVGLNCLRLMNDMTAVALNYGIYKQDLPSLDEKPRIVVFVDMGHSAFQVSACAFNKGKLKVLGTAFDPFLGGKNFDEKLVEHFCAEFKTKYKLDAKSKIRALLRLYQECEKLKKLMSSNSTDLPLNIECFMNDKDVSGKMNRSQFEELCAELLQKIEVPLYSLLEQTHLKVEDVSAVEIVGGATRIPAVKERIAKFFGKDISTTLNADEAVARGCALQCAILSPAFKVREFSVTDAVPFPISLIWNHDSEDTEGVHEVFSRNHAAPFSKVLTFLRRGPFELEAFYSDPQGVPYPEAKIGRFVVQNVSAQKDGEKSRVKVKVRVNTHGIFTISTASMVEKVPTEENEMSSEADMECLNQRPPENPDTDANEKKVDQPPEAKKPKIKVVNVELPIEANLVWQLGKDLLNMYIETEGKMIMQDKLEKERNDAKNAVEEYVYEFRDKLCGPYEKFICEQDHQNFLRLLTETEDWLYEEGEDQAKQAYVDKLEELMKIGTPVKVRFQEAEERPKMFEELGQRLQHYAKIAADFRNKDEKYNHIDESEMKKVEKSVNEVMEWMNNVMNAQAKKSLDQDPVVRAQEIKTKIKELNNTCEPVVTQPKPKIESPKLERTPNGPNIDKKEEDLEDKNNFGAEPPHQNGECYPNEKNSVNMDLD

SEQ ID NO: 357 - DNA, 3262 bp, Homo sapiens
aggaaatggtttctggaaaacgttagtaaggtcagtttttaaacactgaatccaaggttgtcttctggaatatccaaattggttatgaccagaatgtgattcattatactaagctaaaggaatagattaaagaattagcaacagtggccgggtgcagtggctcatgcctgtaaccccagcactttgggggaggcccaggtgggtggatcatttgaggtcaggagtttgagaccagcctggccaacatggtgaaacctaaaaatacaaaaattagccaggtgtggtggcaggtgcttgtaatcccagctgcttgggaggctgaagcaggagaattgcttgaacccggaggcaggggttgcagtgagccaagatcacaccattgcactccagcctgggtggcagagtgagactctgtctcaaaaattaaaaagcaacagtgtatatgcaatagttgcaagatgtaagatcacccaaagagtatgcagagggaaatgagggacagaacccagaaatattaatacccagggagtgaacaggaggaggaccccaagaagttactgagtcagatttttcccactcatccaggtgaaagtttaggtcaataatgtgaaataccagagggattaaatgtctacagaaataaaaccatgtctcacattaagacaaacaagtaggttggagggatattttgaaaggcaaggtgatattaaactttattctgaaagtagtttgttagagaaagaggcatgataagagttgcagttaactgattggaaactatgcagcagatgaaactggaataaaggaaactcatcaggaaatgattatagtaataagggccagaaataagggcttgcttgcctgaactaaaaacaaagaggatacaaaggttctagaaatatttcaaaggaattagctttaattcagcaatactcattgagaatcacctatgcacctggctctgaagatgaagtgctgagtaaacttagacatggaccctgctatcatggagatggcagattattggtcagaatgctcttacctgtcattgtagcaattttgttagatccttaatacctctgaattgctaataaacttgttttggctgaaaaaatagtcctgtgaattttaccatgcagttaaataagaaactaaaagcaaacctaaataccaccaaaaaggttagtagtctgttatatgcattagccttaatctaaggaaatattttattataggtctccttgaagaaaatgatattttcaggaatgctcaagcaggtgttctcatcagcactaatagtcatccaatcttaaggaaaaacagaatatttgatggatttgccgcaggtattgaaattacaaatcacgcaactgcaacactagaaggcaatcagatttttaacaaccggtttggaggcttatttttagcatctggtgttaatgtgacaatgaaagataacaaaataatgaacaatcaagatgccatagaaaaggctgttagtagaggccaatgtttatataaaatatcaagttataccagctatcccatgcatgatttctacagatgtcatacttgtaacaccacagatcgaaatgccatatgtgtgaactgcattaagaagtgccatcagggacatgatgtagagtttattagacatgataggtatgtagcacacttgcttgatatattacccaattactttccccctcacttttctaatatttgggtttcattttgctttaggtttttctgtgactgtggtgctggaacactgtctaatccttgtacattagctggtgagcctacacatgatacagatacactatatgactctgctccacctatagaatctaatacattgcagcacaactgaattccttccctaaagaaaaagtcctgccattgtaacatcataacttaaaacacttttttggaagaagatttaaaatatttgcccatgctacaggaagagactgtattaaaaatggatacacaaggtcagttgacactatgaagctcaagctaccaaaaagaaagtggcaatatattgactcaggatctcaaagctgggtgttttagcattactgtgtaaagacttgaagggacagaagtgaagaaaataagctgcaattttgtacagataccaacttctgaaaagctggtgtttttacaactagcattgaatgcagtccaatttgcagtagtaatcttcaatagacaagcagctttgttgctgcctttatggacatgggtaccaattgcttttgtaatatggtaaaaatgtgagctagcacttctgcgttccttttgattttttttttttaacatgtattcagattgagaaatatgattttaatgccttaatctcatgtagtttgtttttaatttcaagcaaaatcttactgtacttgaatgtgccctgttttgttagcacacctagacttgctgtaactgtactcatgtcccagtatgtacgttctttctatgaaagagaaaacactaatcttaaattatatccagcaatgtttctggtatcctttaagaaaagttaagactattatttccttcccttccctgtgcagcattcaaaaatcacccctagaaaaagtgagtgttttaatgagacttcctaggaagggatgcactgtaaaacaaaagtattcttgtaactcagttttgtgaaaggtaaaaaactactatgttttaagtacactttagaaagtctcttcaaaacaaacagtcctgtatttgaactctgttcatagtttttttttgaacagtttagacaaaactgttggaaattaaaccaatttcctgcattaagctgagacaagtatataaacagccctatacagtttcatagcttttcctcccccatttatgtgtattggtgacagtgggtataaaacagcctgaaagtgtatgcatgtaccataacatttagacttaatatattgtggagtattcaataaccattatgtagaaggtagataagaattaaaagggtttaatttcctagaaagaaaatggaaaaatggtcatttttaaaaaataaagtttattagatcataatgttgtctgaatttaccacctttgtcagaagtcaactcaaagcttccaatgtagtcagtctataattccttaatcaaagtcagcaatttatggacagcttcagcatttacagttgacctttcactagccaggcaaacttcccttaaaattaaaaaaaaaaaaaaaaaaaaaaaaaaaaaaaaaaaaaaaa

SEQ ID NO: 358 - protein, 141 aa, Homo sapiens
MKDNKIMNNQDAIEKAVSRGQCLYKISSYTSYPMHDFYRCHTCNTTDRNAICVNCIKKCHQGHDVEFIRHDRYVAHLLDILPNYFPPHFSNIWVSFCFRFFCDCGAGTLSNPCTLAGEPTHDTDTLYDSAPPIESNTLQHN

SEQ ID NO: 359 - DNA, 810 bp, Homo sapiens
gcgacgcgccgaggtactaggcagagccgtggaaccgccgccaggtcgctgttggtccacgccgcccgtcgcgccgcccgcccgctcagcgtccgccgccgccatgggagtgcaggtggaaaccatctccccaggagacgggcgcaccttccccaagcgcggccagacctgcgtggtgcactacaccgggatgcttgaagatggaaagaaatttgattcctcccgggacagaaacaagccctttaagtttatgctaggcaagcaggaggtgatccgaggctgggaagaaggggttgcccagatgagtgtgggtcagagagccaaactgactatatctccagattatgcctatggtgccactgggcacccaggcatcatcccaccacatgccactctcgtcttcgatgtggagcttctaaaactggaatgacaggaatggcctcctcccttagctccctgttcttgggtaaggaaatggaatactgaagggcccttcactgcctttgctcctcccatgttatgcccagcgtttgatgggtagcagagagaacaaaaaacaccacaaggctatttttccccctgcattctttctgtattgagtatcctttcagtgttattagtgtatgctttgaatgtaaaaattggtcaccctaaggaaaggaattggcatgtgtatgttcccagttcaactcatggagatggcagctgtttaaatgtttttctatgtagtttataaattaaaactgaattgaggactatggaaatgtaggccaaatttgtagtgccaacattttagttctttggaaataa

SEQ ID NO: 360 - protein, 108 aa, Homo sapiens
MGVQVETISPGDGRTFPKRGQTCVVHYTGMLEDGKKFDSSRDRNKPFKFMLGKQEVIRGWEEGVAQMSVGQRAKLTISPDYAYGATGHPGIIPPHATLVFDVELLKLE

SEQ ID NO: 361 - DNA, 5341 bp, Homo sapiens
gcacagtctgtctcttcgccggttcccggccccgtggatcctacttctctgtcgcccgcggttcgccgccccgctcgccgccgcgatgccagtgtttcatacgcgcacgatcgagagcatcctggagccggtggcacagcagatctcccacctggtgataatgcacgaggagggcgaggtggacggcaaagccattcctgacctcaccgcgcccgtggccgccgtgcaggcggccgtcagcaacctcgtccgggttggaaaagagactgttcaaaccactgaggatcagattttgaagagagatatgccaccagcatttattaaggttgagaatgcttgcaccaagcttgtccaggcagctcagatgcttcagtcagacccttactcagtgcctgctcgagattatctaattgatgggtcaaggggcatcctctctggaacatcagacctgctccttaccttcgatgaggctgaggtccgtaaaattattagagtttgcaaaggaattttggaatatcttacagtggcagaggtggtggagactatggaagatttggtcacttacacaaagaatcttgggccaggaatgactaagatggccaagatgattgacgagagacagcaggagctcactcaccaggagcaccgagtgatgttggtgaactcgatgaacaccgtgaaagagttgctgccagttctcatttcagctatgaagatttttgtaacaactaaaaactcaaaaaaccaaggcatagaggaagctttaaaaaatcgcaattttactgtagaaaaaatgagtgctgaaattaatgagataattcgtgtgttacaactcacctcttgggatgaagatgcctgggccagcaaggacactgaagccatgaagagagcattggcctccatagactccaaactgaaccaggccaaaggttggctccgtgaccctagtgcctccccaggggatgctggtgagcaggccatcagacagatcttagatgaagctggaaaagttggtgaactctgtgcaggcaaagaacgcagggagattctgggaacttgcaaaatgctagggcagatgactgatcaagtggctgacctccgtgccagaggacaaggatcctcaccggtggccatgcagaaagctcagcaggtatctcagggtctggatgtgctcacagcaaaagtggaaaatgcagctcgcaagctggaagccatgaccaactcaaagcagagcattgcaaagaagatcgatgctgctcagaactggcttgcagatccaaatggtggaccggaaggagaagagcagattcgaggtgctttggctgaagctcggaaaatagcagaattatgtgatgatcctaaagaaagagatgacattctacgttcccttggggaaatatctgctctgacttctaaattagcagatctacgaagacaggggaaaggagattctccagaggctcgagccttggccaaacaggtggccacggccctgcagaacctgcagaccaaaaccaaccgggctgtggccaacagcagaccggccaaagcagctgtacaccttgagggcaagattgagcaagcacagcggtggattgataatcccacagtggatgaccgtggagtcggtcaggctgccatccgggggcttgtggccgaagggcatcgtctggctaatgttatgatggggccttatcggcaagatcttctcgccaagtgtgaccgagtggaccagctgacagcccagctggctgacctggctgccagaggggaaggggagagtcctcaggcacgagcacttgcatctcagctccaagactccttaaaggatctaaaagctcggatgcaggaggccatgactcaggaagtgtcagatgttttcagcgataccacaactcccatcaagctgttggcagtggcagccacggcgcctcctgatgcgcctaacagggaagaggtatttgatgagagggcagctaactttgaaaaccattcaggaaagcttggtgctacggccgagaaggcggctgcggttggtactgctaataaatcaacagtggaaggcattcaggcctcagtgaagacggcccgagaactcacaccccaggtggtctcggctgctcgtatcttacttaggaaccctggaaatcaagctgcttatgaacattttgagaccatgaagaaccagtggatcgataatgttgaaaaaatgacagggctggtggacgaagccattgataccaaatctctgttggatgcttcagaagaagcaattaaaaaagacctggacaagtgcaaggtagctatggccaacattcagcctcagatgctggttgctggggcaaccagtattgctcgtcgggccaaccggatcctgctggtggctaagagggaggtggagaattccgaggatcccaagttccgtgaggctgtgaaagctgcctctgatgaattgagcaaaaccatctccccaatggtgatggatgcaaaagctgtggctggaaacatttccgaccctggactgcaaaagagcttcctggactcaggatatcggatcctgggagctgtggccaaggtcagagaagccttccaacctcaggagcctgacttcccgccgcctccaccagaccttgaacaactccgactaacagatgagcttgctcctcccaaaccacctctgcctgaaggtgaggtccctccacctaggcctccaccaccagaggaaaaggatgaagagttccctgagcagaaggccggggaggtgattaaccagccaatgatgatggctgccagacagctccatgatgaagctcgcaaatggtccagcaagccgggcatcccagccgctgaggtgggtataggtgttgtagctgaggcagatgcggccgatgctgctggcttccctgtcccccctgacatggaagacgattacgaacctgagctgctgttaatgccatccaatcagccggtcaaccagcccattctggccgcggctcagtccttgcatcgggaagctaccaagtggtctagtaagggcaatgacatcattgcagcagccaagcgcatggctctgctgatggctgagatgtctcggctggtaagagggggcagtggtaccaagcgggcactcattcagtgtgccaaggacatcgccaaggcctcagatgaggtgactcggttggccaaggaggttgccaagcagtgcacagataaacggattagaaccaacctcttacaggtatgtgagcgaatcccaaccataagcacccagctcaaaatcctgtccacagtgaaggccaccatgctgggccggaccaacatcagtgatgaggagtctgagcaggccacagagatgctggttcacaatgcccagaacctcatgcagtctgtgaaggagactgtgcgggaagctgaagctgcttcaatcaaaattcgaacagatgctggatttacactgcgctgggttagaaagactccctggtaccagtaggcacctggctgagcctggctggcacagaaacctctactaaaaagaaggaaaatgatctgagtcccaggagctgcccagagttgctgggagctgaaaaatcacatcctggcctggcacatcagaaaggaatgggggcctcttcaaattagaagacatttatactcttttttcatggacactttgaaatgtgtttctgtataaagcctgtattctcaaacacagttacacttgtgcaccctctatcccaataggcagactgggtttctagcccatggacttcacataagctcagaatccaagtgaacactagccagacactctgctctgcccttgttccctaggggacacttccctctgtttctctttccttggctcccattcactcttccagaatcccaagacccagggcccaggcaaatcagttactaagaagaaaattgctgtgcctcccaaaattgttttgagctttccatgttgctgccaaccataccttccttccctgggctgtgctacctgggtccttttcagaagtgagctttgctgctacaggggaaggtggcctctgtggagccccagcatatgggggcctggattcatttcctgcccttcctcagtttaatccttctagtttcccacaatataaaactgtacttcactgtcaggaagaaatcacagaatcatatgattctgcttttaccatgcccctgagcaatgtctgtgctagggaaactccccgtcccatatcctgcctcagcccgccaaggtagccatcccatgaacacactgtgtcctggtgctctctgccactggaagggcagagtagccagggtgtggccctgccatcttcccagcagggccactcccggcactccatgcttagtcactgcctgcagaggtctgtgctgaggccttatcattcattcttagctcttaattgttcattttgagctgaaatgctgcattttaattttaaccaaaacatgtctcctatatcctggtttttgtagccttcctccacatcctttctaaacaagattttaaagacatgtaggtgtttgttcatctgtaactctaaaagatcctttttaaattcagtcctaagaaagaggagtgcttgtcccctaagagtgtttaatggcaaggcagccctgtctgaaggacacttcctgcctaagggagagtggtatttgcagactagaattctagtgctgctgaagatgaatcaatgggaaatactactcctgtaattcctacctccctgcaaccaactacaaccaagctctctgcatctactcccaagtatggggttcaagagagtaatgggtttcatatttcttatcaccacagtaagttcctactaggcaaaatgagagggcagtgtttcctttttggtacttattactgctaagtatttcccagcacatgaaaccttattttttccaaagccagaaccagatgagtaaaggagtaagaaccttgcctgaacatccttccttcccacccatcgctgtgtgttagttcccaacatcgaatgtgtacaacttaagttggtcctttacactcaggctttcactatttcctttaaaatgaggatgattattttcaaggccctcagcatatttgtatagttgcttgcctgatataaatgcaatattaatgcctttaaagtatgaatctatgccaaagatcacttgttgttttactaaagaaagattacttagaggaaataagaaaaatcatgtttgctctcccggttcttccagtggtttgagacactggtttacactttatgccggatgtgcttttctccaatatcagtgctcgagacacagtgaagcaaattaaaaaaaa

SEQ ID NO: 362 - protein, 1134 aa, Homo sapiens
MPVFHTRTIESILEPVAQQISHLVIMHEEGEVDGKAIPDLTAPVAAVQAAVSNLVRVGKETVQTTEDQILKRDMPPAFIKVENACTKLVQAAQMLQSDPYSVPARDYLIDGSRGILSGTSDLLLTFDEAEVRKIIRVCKGILEYLTVAEVVETMEDLVTYTKNLGPGMTKMAKMIDERQQELTHQEHRVMLVNSMNTVKELLPVLISAMKIFVTTKNSKNQGIEEALKNRNFTVEKMSAEINEIIRVLQLTSWDEDAWASKDTEAMKRALASIDSKLNQAKGWLRDPSASPGDAGEQAIRQILDEAGKVGELCAGKERREILGTCKMLGQMTDQVADLRARGQGSSPVAMQKAQQVSQGLDVLTAKVENAARKLEAMTNSKQSIAKKIDAAQNWLADPNGGPEGEEQIRGALAEARKIAELCDDPKERDDILRSLGEISALTSKLADLRRQGKGDSPEARALAKQVATALQNLQTKTNRAVANSRPAKAAVHLEGKIEQAQRWIDNPTVDDRGVGQAAIRGLVAEGHRLANVMMGPYRQDLLAKCDRVDQLTAQLADLAARGEGESPQARALASQLQDSLKDLKARMQEAMTQEVSDVFSDTTTPIKLLAVAATAPPDAPNREEVFDERAANFENHSGKLGATAEKAAAVGTANKSTVEGIQASVKTARELTPQVVSAARILLRNPGNQAAYEHFETMKNQWIDNVEKMTGLVDEAIDTKSLLDASEEAIKKDLDKCKVAMANIQPQMLVAGATSIARRANRILLVAKREVENSEDPKFREAVKAASDELSKTISPMVMDAKAVAGNISDPGLQKSFLDSGYRILGAVAKVREAFQPQEPDFPPPPPDLEQLRLTDELAPPKPPLPEGEVPPPRPPPPEEKDEEFPEQKAGEVINQPMMMAARQLHDEARKWSSKPGIPAAEVGIGVVAEADAADAAGFPVPPDMEDDYEPELLLMPSNQPVNQPILAAAQSLHREATKWSSKGNDIIAAAKRMALLMAEMSRLVRGGSGTKRALIQCAKDIAKASDEVTRLAKEVAKQCTDKRIRTNLLQVCERIPTISTQLKILSTVKATMLGRTNISDEESEQATEMLVHNAQNLMQSVKETVREAEAASIKIRTDAGFTLRWVRKTPWYQ

SEQ ID NO: 363 - DNA, 1934 bp, Homo sapiens
gtccatggggaccctcgccttcgatgaatatgggcgccctttcctcatcatcaaggatcaggaccgcaagtcccgtcttatgggacttgaggccctcaagtctcatataatggcagcaaaggctgtagcaaatacaatgagaacatcacttggaccaaatgggcttgataagatgatggtggataaggatggggatgtgactgtaactaatgatggggccaccatcttaagcatgatggatgttgatcatcagattgccaagctgatggtggaactgtccaagtctcaggatgatgaaattggagatggaaccacaggagtggttgtcctggctggtgccttgttagaagaagcggagcaattgctagaccgaggcattcacccaatcagaatagccgatggctatgagcaggctgctcgcgttgctattgaacacctggacaagatcagcgatagcgtccttgttgacataaaggacaccgaacccctgattcagacagcaaaaaccacgctgggctccaaagtggtcaacagttgtcaccgacagatggctgagattgctgtgaatgccgtcctcactgtagcagatatggagcggagagacgttgactttgagcttatcaaagtagaaggcaaagtgggcggcaggctggaggacactaaactgattaagggcgtgattgtggacaaggatttcagtcacccacagatgccaaaaaaagtggaagatgcgaagattgcaattctcacatgtccatttgaaccacccaaaccaaaaacaaagcataagctggatgtgacctctgtcgaagattataaagcccttcagaaatacgaaaaggagaaatttgaagagatgattcaacaaattaaagagactggtgctaacctagcaatttgtcagtggggctttgatgatgaagcaaatcacttacttcttcagaacaacttgcctgcggttcgctgggtaggaggacctgaaattgagctgattgccatcgcaacaggagggcggatcgtccccaggttctcagagctcacagccgagaagctgggctttgctggtcttgtacaggagatctcatttgggacaactaaggataaaatgctggtcatcgagcagtgtaagaactccagagctgtaaccatttttattagaggaggaaataagatgatcattgaggaggcgaaacgatcccttcacgatgctttgtgtgtcatccggaacctcatccgcgataatcgtgtggtgtatggaggaggggctgctgagatatcctgtgccctggcagttagccaagaggcggataagtgccccaccttagaacagtatgccatgagagcgtttgccgacgcactggaggtcatccccatggccctctctgaaaacagtggcatgaatcccatccagactatgaccgaagtccgagccagacaggtgaaggagatgaaccctgctcttggcatcgactgtttgcacaaggggacaaatgatatgaagcaacagcatgtcatagaaaccttgattggcaaaaagcaacagatatctcttgcaacacaaatggttagaatgattttgaagattgatgacattcgtaagcctggagaatctgaagaatgaagacattgagaaaactatgtagcaagatccacttctgtgattaagtaaatggatgtctcgtgatgcgtctacagttatttattgttacatccttttccagacactgtagatgctataataaaaatagctgtttggtaaccatagtttcacttgttcaaagctgtgtaatcgtgggggtactatctcaactgcttttgtattcattgtattaaaagaatctgtttaaacaacctttatcttctcttcgggtttaagaaacgtttattgtaacagtaattaaatgctgccttaattgaaaaaaaaaaaaaaaaaa

SEQ ID NO: 364 - protein, 539 aa, Homo sapiens
SMGTLAFDEYGRPFLIIKDQDRKSRLMGLEALKSHIMAAKAVANTMRTSLGPNGLDKMMVDKDGDVTVTNDGATILSMMDVDHQIAKLMVELSKSQDDEIGDGTTGVVVLAGALLEEAEQLLDRGIHPIRIADGYEQAARVAIEHLDKISDSVLVDIKDTEPLIQTAKTTLGSKVVNSCHRQMAEIAVNAVLTVADMERRDVDFELIKVEGKVGGRLEDTKLIKGVIVDKDFSHPQMPKKVEDAKIAILTCPFEPPKPKTKHKLDVTSVEDYKALQKYEKEKFEEMIQQIKETGANLAICQWGFDDEANHLLLQNNLPAVRWVGGPEIELIAIATGGRIVPRFSELTAEKLGFAGLVQEISFGTTKDKMLVIEQCKNSRAVTIFIRGGNKMIIEEAKRSLHDALCVIRNLIRDNRVVYGGGAAEISCALAVSQEADKCPTLEQYAMRAFADALEVIPMALSENSGMNPIQTMTEVRARQVKEMNPALGIDCLHKGTNDMKQQHVIETLIGKKQQISLATQMVRMILKIDDIRKPGESEE

SEQ ID NO: 365 - DNA, 576 bp, Homo sapiens
aaacactctgtgtggctcctcggctttgggacagagtgcaagacgatgacttgcaaaatgtcgcagctggaacgcaacatagagaccatcatcaacaccttccaccaatactctgtgaagctggggcacccagacaccctgaaccagggggaattcaaagagctggtgcgaaaagatctgcaaaattttctcaagaaggagaataagaatgaaaaggtcatagaacacatcatggaggacctggacacaaatgcagacaagcagctgagcttcgaggagttcatcatgctgatggcgaggctaacctgggcctcccacgagaagatgcacgagggtgacgagggccctggccaccaccataagccaggcctcggggagggcaccccctaagaccacagtggccaagatcacagtggccacggccatggccacagtcatggtggccacggccacaggccactaatcaggaggccaggccaccctgcctctacccaaccagggccccggggcctgttatgtcaaactgtcttggctgtggggctaggggctggggccaaataaagtctcttcctccaa

SEQ ID NO: 366 - protein, 114 aa, Homo sapiens
MTCKMSQLERNIETIINTFHQYSVKLGHPDTLNQGEFKELVRKDLQNFLKKENKNEKVIEHIMEDLDTNADKQLSFEEFIMLMARLTWASHEKMHEGDEGPGHHHKPGLGEGTP

SEQ ID NO: 367 - DNA, 9588 bp, Homo sapiens
ccgaccaacaccaacacccagctccgacgcagctcctctgcgcccttgccgccctccgagccacagctttcctcccgctcctgcccccggcccgtcgccgtctccgcgctcgcagcggcctcgggagggcccaggtagcgagcagcgacctcgcgagccttccgcactcccgcccggttccccggccgtccgcctatccttggccccctccgctttctccgcgccggcccgcctcgcttatgcctcggcgctgagccgctctcccgattgcccgccgacatgagctgcaacggaggctcccacccgcggatcaacactctgggccgcatgatccgcgccgagtctggcccggacctgcgctacgaggtgaccagcggcggcgggggcaccagcaggatgtactattctcggcgcggcgtgatcaccgaccagaactcggacggctactgtcaaaccggcacgatgtccaggcaccagaaccagaacaccatccaggagctgctgcagaactgctccgactgcttgatgcgagcagagctcatcgtgcagcctgaattgaagtatggagatggaatacaactgactcggagtcgagaattggatgagtgttttgcccaggccaatgaccaaatggaaatcctcgacagcttgatcagagagatgcggcagatgggccagccctgtgatgcttaccagaaaaggcttcttcagctccaagagcaaatgcgagccctttataaagccatcagtgtccctcgagtccgcagggccagctccaagggtggtggaggctacacttgtcagagtggctctggctgggatgagttcaccaaacatgtcaccagtgaatgtttggggtggatgaggcagcaaagggcggagatggacatggtggcctggggtgtggacctggcctcagtggagcagcacattaacagccaccggggcatccacaactccatcggcgactatcgctggcagctggacaaaatcaaagccgacctgcgcgagaaatctgcgatctaccagttggaggaggagtatgaaaacctgctgaaagcgtcctttgagaggatggatcacctgcgacagctgcagaacatcattcaggccacgtccagggagatcatgtggatcaatgactgcgaggaggaggagctgctgtacgactggagcgacaagaacaccaacatcgctcagaaacaggaggccttctccatacgcatgagtcaactggaagttaaagaaaaagagctcaataagctgaaacaagaaagtgaccaacttgtcctcaatcagcatccagcttcagacaaaattgaggcctatatggacactctgcagacgcagtggagttggattcttcagatcaccaagtgcattgatgttcatctgaaagaaaatgctgcctactttcagttttttgaagaggcgcagtctactgaagcatacctgaaggggctccaggactccatcaggaagaagtacccctgcgacaagaacatgcccctgcagcacctgctggaacagatcaaggagctggagaaagaacgagagaaaatccttgaatacaagcgtcaggtgcagaacttggtaaacaagtctaagaagattgtacagctgaagcctcgtaacccagactacagaagcaataaacccattattctcagagctctctgtgactacaaacaagatcagaaaatcgtgcataagggggatgagtgtatcctgaaggacaacaacgagcgcagcaagtggtacgtgacgggcccgggaggcgttgacatgcttgttccctctgtggggctgatcatccctcctccgaacccactggccgtggacctctcttgcaagattgagcagtactacgaagccatcttggctctgtggaaccagctctacatcaacatgaagagcctggtgtcctggcactactgcatgattgacatagagaagatcagggccatgacaatcgccaagctgaaaacaatgcggcaggaagattacatgaagacgatagccgaccttgagttacattaccaagagttcatcagaaatagccaaggctcagagatgtttggagatgatgacaagcggaaaatacagtctcagttcaccgatgcccagaagcattaccagaccctggtcattcagctccctggctatccccagcaccagacagtgaccacaactgaaatcactcatcatggaacctgccaagatgtcaaccataataaagtaattgaaaccaacagagaaaatgacaagcaagaaacatggatgctgatggagctgcagaagattcgcaggcagatagagcactgcgagggcaggatgactctcaaaaacctccctctagcagaccaggggtcttctcaccacatcacagtgaaaattaacgagcttaagagtgtgcagaatgattcacaagcaattgctgaggttctcaaccagcttaaagatatgcttgccaacttcagaggttctgaaaagtactgctatttacagaatgaagtatttggactatttcagaaactggaaaatatcaatggtgttacagatggctacttaaatagcttatgcacagtaagggcactgctccaggctattctccaaacagaagacatgttaaaggtttatgaagccaggctcactgaggaggaaactgtctgcctggacctggataaagtggaagcttaccgctgtggactgaagaaaataaaaaatgacttgaacttgaagaagtcgttgttggccactatgaagacagaactacagaaagcccagcagatccactctcagacttcacagcagtatccactttatgatctggacttgggcaagttcggtgaaaaagtcacacagctgacagaccgctggcaaaggatagataaacagatcgactttagattatgggacctggagaaacaaatcaagcaattgaggaattatcgtgataactatcaggctttctgcaagtggctctatgatcgtaaacgccgccaggattccttagaatccatgaaatttggagattccaacacagtcatgcggtttttgaatgagcagaagaacttgcacagtgaaatatctggcaaacgagacaaatcagaggaagtacaaaaaattgctgaactttgcgccaattcaattaaggattatgagctccagctggcctcatacacctcaggactggaaactctgctgaacatacctatcaagaggaccatgattcagtccccttctggggtgattctgcaagaggctgcagatgttcatgctcggtacattgaactacttacaagatctggagactattacaggttcttaagtgagatgctgaagagtttggaagatctgaagctgaaaaataccaagatcgaagttttggaagaggagctcagactggcccgagatgccaactcggaaaactgtaataagaacaaattcctggatcagaacctgcagaaataccaggcagagtgttcccagttcaaagcgaagcttgcgagcctggaggagctgaagagacaggctgagctggatgggaagtcggctaagcaaaatctagacaagtgctacggccaaataaaagaactcaatgagaagatcacccgactgacttatgagattgaagatgaaaagagaagaagaaaatctgtggaagacagatttgaccaacagaagaatgactatgaccaactgcagaaagcaaggcaatgtgaaaaggagaaccttggttggcagaaattagagtctgagaaagccatcaaggagaaggagtacgagattgaaaggttgagggttctactgcaggaagaaggcacccggaagagagaatatgaaaatgagctggcaaaggtaagaaaccactataatgaggagatgagtaatttaaggaacaagtatgaaacagagattaacattacgaagaccaccatcaaggagatatccatgcaaaaagaggatgattccaaaaatcttagaaaccagcttgatagactttcaagggaaaatcgagatctgaaggatgaaattgtcaggctcaatgacagcatcttgcaggccactgagcagcgaaggcgagctgaagaaaacgcccttcagcaaaaggcctgtggctctgagataatgcagaagaagcagcatctggagatagaactgaagcaggtcatgcagcagcgctctgaggacaatgcccggcacaagcagtccctggaggaggctgccaagaccattcaggacaaaaataaggagatcgagagactcaaagctgagtttcaggaggaggccaagcgccgctgggaatatgaaaatgaactgagtaaggtaagaaacaattatgatgaggagatcattagcttaaaaaatcagtttgagaccgagatcaacatcaccaagaccaccatccaccagctcaccatgcagaaggaagaggataccagtggctaccgggctcagatagacaatctcacccgagaaaacaggagcttatctgaagaaataaagaggctgaagaacactctaacccagaccacagagaatctcaggagggtggaagaagacatccaacagcaaaaggccactggctctgaggtgtctcagaggaaacagcagctggaggttgagctgagacaagtcactcagatgcgaacagaggagagcgtaagatataagcaatctcttgatgatgctgccaaaaccatccaggataaaaacaaggagatagaaaggttaaaacaactgatcgacaaagaaacaaatgaccggaaatgcctggaagatgaaaacgcgagattacaaagggtccagtatgacctgcagaaagcaaacagtagtgcgacggagacaataaacaaactgaaggttcaggagcaagaactgacacgcctgaggatcgactatgaaagggtttcccaggagaggactgtgaaggaccaggatatcacgcggttccagaactctctgaaagagctgcagctgcagaagcagaaggtggaagaggagctgaatcggctgaagaggaccgcgtcagaagactcctgcaagaggaagaagctggaggaagagctggaaggcatgaggaggtcgctgaaggagcaagccatcaaaatcaccaacctgacccagcagctggagcaggcatccattgttaagaagaggagtgaggatgacctccggcagcagagggacgtgctggatggccacctgagggaaaagcagaggacccaggaagagctgaggaggctctcttctgaggtcgaggccctgaggcggcagttactccaggaacaggaaagtgtcaaacaagctcacttgaggaatgagcatttccagaaggcgatagaagataaaagcagaagcttaaatgaaagcaaaatagaaattgagaggctgcagtctctcacagagaacctgaccaaggagcacttgatgttagaagaagaactgcggaacctgaggctggagtacgatgacctgaggagaggacgaagcgaagcggacagtgataaaaatgcaaccatcttggaactaaggagccagctgcagatcagcaacaaccggaccctggaactgcaggggctgattaatgatttacagagagagagggaaaatttgagacaggaaattgagaaattccaaaagcaggctttagaggcatctaataggattcaggaatcaaagaatcagtgtactcaggtggtacaggaaagagagagccttctggtgaaaatcaaagtcctggagcaagacaaggcaaggctgcagaggctggaggatgagctgaatcgtgcaaaatcaactctagaggcagaaaccagggtgaaacagcgcctggagtgtgagaaacagcaaattcagaatgacctgaatcagtggaagactcaatattcccgcaaggaggaggctattaggaagatagaatcggaaagagaaaagagtgagagagagaagaacagtcttaggagtgagatcgaaagactccaagcagagatcaagagaattgaagagaggtgcaggcgtaagctggaggattctaccagggagacacagtcacagttagaaacagaacgctcccgatatcagagggagattgataaactcagacagcgcccatatgggtcccatcgagagacccagactgagtgtgagtggaccgttgacacctccaagctggtgtttgatgggctgaggaagaaggtgacagcaatgcagctctatgagtgtcagctgatcgacaaaacaaccttggacaaactattgaaggggaagaagtcagtggaagaagttgcttctgaaatccagccattccttcggggtgcaggatctatcgctggagcatctgcttctcctaaggaaaaatactctttggtagaggccaagagaaagaaattaatcagcccagaatccacagtcatgcttctggaggcccaggcagctacaggtggtataattgatccccatcggaatgagaagctgactgtcgacagtgccatagctcgggacctcattgacttcgatgaccgtcagcagatatatgcagcagaaaaagctatcactggttttgatgatccattttcaggcaagacagtatctgtttcagaagccatcaagaaaaatttgattgatagagaaaccggaatgcgcctgctggaagcccagattgcttcagggggtgtagtagaccctgtgaacagtgtctttttgccaaaagatgtcgccttggcccgggggctgattgatagagatttgtatcgatccctgaatgatccccgagatagtcagaaaaactttgtggatccagtcaccaaaaagaaggtcagttacgtgcagctgaaggaacggtgcagaatcgaaccacatactggtctgctcttgctttcagtacagaagagaagcatgtccttccaaggaatcagacaacctgtgaccgtcactgagctagtagattctggtatattgagaccgtccactgtcaatgaactggaatctggtcagatttcttatgacgaggttggtgagagaattaaggacttcctccagggttcaagctgcatagcaggcatatacaatgagaccacaaaacagaagcttggcatttatgaggccatgaaaattggcttagtccgacctggtactgctctggagttgctggaagcccaagcagctactggctttatagtggatcctgttagcaacttgaggttaccagtggaggaagcctacaagagaggtctggtgggcattgagttcaaagagaagctcctgtctgcagaacgagctgtcactgggtataatgatcctgaaacaggaaacatcatctctttgttccaagccatgaataaggaactcatcgaaaagggccacggtattcgcttattagaagcacagatcgcaaccggggggatcattgacccaaaggagagccatcgtttaccagttgacatagcatataagaggggctatttcaatgaggaactcagtgagattctctcagatccaagtgatgataccaaaggattttttgaccccaacactgaagaaaatcttacctatctgcaactaaaagaaagatgcattaaggatgaggaaacagggctctgtcttctgcctctgaaagaaaagaagaaacaggtgcagacatcacaaaagaataccctcaggaagcgtagagtggtcatagttgacccagaaaccaataaagaaatgtctgttcaggaggcctacaagaagggcctaattgattatgaaaccttcaaagaactgtgtgagcaggaatgtgaatgggaagaaataaccatcacgggatcagatggctccaccagggtggtcctggtagatagaaagacaggcagtcagtatgatattcaagatgctattgacaagggccttgttgacaggaagttctttgatcagtaccgatccggcagcctcagcctcactcaatttgctgacatgatctccttgaaaaatggtgtcggcaccagcagcagcatgggcagtggtgtcagcgatgatgtttttagcagctcccgacatgaatcagtaagtaagatttccaccatatccagcgtcaggaatttaaccataaggagcagctctttttcagacaccctggaagaatcgagccccattgcagccatctttgacacagaaaacctggagaaaatctccattacagaaggtatagagcggggcatcgttgacagcatcacgggtcagaggcttctggaggctcaggcctgcacaggtggcatcatccacccaaccacgggccagaagctgtcacttcaggacgcagtctcccagggtgtgattgaccaagacatggccaccagcgtgaagcctgctcagaaagccttcataggcttcgagggtgtgaagggaaagaagaagatgtcagcagcagaggcagtgaaagaaaaatggctcccgtatgaggctggccagcgcttcctggagttccagtacctcacgggaggtcttgttgacccggaagtgcatgggaggataagcaccgaagaagccatccggaaggggttcatagatggccgcgccgcacagaggctgcaagacaccagcagctatgccaaaatcctgacctgccccaaaaccaaattaaaaatatcctataaggatgccataaatcgctccatggtagaagatatcactgggctgcgccttctggaagccgcctccgtgtcgtccaagggcttacccagcccttacaacatgtcttcggctccggggtcccgctccggctcccgctcgggatctcgctccggatctcgctccgggtcccgcagtgggtcccggagaggaagctttgacgccacagggaattcttcctactcttattcctactcatttagcagtagttctattgggcactagtagtcagttgggagtggttgctataccttgacttcatttatatgaatttccactttattaaataatagaaaagaaaatcccggtgcttgcagtagagtgataggacattctatgcttacagaaaatatagccatgattgaaatcaaatagtaaaggctgttctggctttttatcttcttagctcatcttaaataagcagtacacttggatgcagtgcgtctgaagtgctaatcagttgtaacaatagcacaaatcgaacttaggatttgtttcttctcttctgtgtttcgatttttgatcaattctttaattttggaagcctataatacagttttctattcttggagataaaaattaaatggatcactgatattttagtcattctgcttctcatctaaatatttccatattctgtattaggagaaaattaccctcccagcaccagcccccctctcaaacccccaacccaaaaccaagcattttggaatgagtctcctttagtttcagagtgtggattgtataacccatatactcttcgatgtacttgtttggtttggtattaatttgactgtgcatgacagcggcaatcttttctttggtcaaagttttctgtttattttgcttgtcatattcgatgtactttaaggtgtctttatgaagtttgctattctggcaataaacttttagactttt

SEQ ID NO: 368 - protein, 2000 aa, Homo sapiens
MSCNGGSHPRINTLGRMIRAESGPDLRYEVTSGGGGTSRMYYSRRGVITDQNSDGYCQTGTMSRHQNQNTIQELLQNCSDCLMRAELIVQPELKYGDGIQLTRSRELDECFAQANDQMEILDSLIREMRQMGQPCDAYQKRLLQLQEQMRALYKAISVPRVRRASSKGGGGYTCQSGSGWDEFTKHVTSECLGWMRQQRAEMDMVAWGVDLASVEQHINSHRGIHNSIGDYRWQLDKIKADLREKSAIYQLEEEYENLLKASFERMDHLRQLQNIIQATSREIMWINDCEEEELLYDWSDKNTNIAQKQEAFSIRMSQLEVKEKELNKLKQESDQLVLNQHPASDKIEAYMDTLQTQWSWILQITKCIDVHLKENAAYFQFFEEAQSTEAYLKGLQDSIRKKYPCDKNMPLQHLLEQIKELEKEREKILEYKRQVQNLVNKSKKIVQLKPRNPDYRSNKPIILRALCDYKQDQKIVHKGDECILKDNNERSKWYVTGPGGVDMLVPSVGLIIPPPNPLAVDLSCKIEQYYEAILALWNQLYINMKSLVSWHYCMIDIEKIRAMTIAKLKTMRQEDYMKTIADLELHYQEFIRNSQGSEMFGDDDKRKIQSQFTDAQKHYQTLVIQLPGYPQHQTVTTTEITHHGTCQDVNHNKVIETNRENDKQETWMLMELQKIRRQIEHCEGRMTLKNLPLADQGSSHHITVKINELKSVQNDSQAIAEVLNQLKDMLANFRGSEKYCYLQNEVFGLFQKLENINGVTDGYLNSLCTVRALLQAILQTEDMLKVYEARLTEEETVCLDLDKVEAYRCGLKKIKNDLNLKKSLLATMKTELQKAQQIHSQTSQQYPLYDLDLGKFGEKVTQLTDRWQRIDKQIDFRLWDLEKQIKQLRNYRDNYQAFCKWLYDRKRRQDSLESMKFGDSNTVMRFLNEQKNLHSEISGKRDKSEEVQKIAELCANSIKDYELQLASYTSGLETLLNIPIKRTMIQSPSGVILQEAADVHARYIELLTRSGDYYRFLSEMLKSLEDLKLKNTKIEVLEEELRLARDANSENCNKNKFLDQNLQKYQAECSQFKAKLASLEELKRQAELDGKSAKQNLDKCYGQIKELNEKITRLTYEIEDEKRRRKSVEDRFDQQKNDYDQLQKARQCEKENLGWQKLESEKAIKEKEYEIERLRVLLQEEGTRKREYENELAKVRNHYNEEMSNLRNKYETEINITKTTIKEISMQKEDDSKNLRNQLDRLSRENRDLKDEIVRLNDSILQATEQRRRAEENALQQKACGSEIMQKKQHLEIELKQVMQQRSEDNARHKQSLEEAAKTIQDKNKEIERLKAEFQEEAKRRWEYENELSKVRNNYDEEIISLKNQFETEINITKTTIHQLTMQKEEDTSGYRAQIDNLTRENRSLSEEIKRLKNTLTQTTENLRRVEEDIQQQKATGSEVSQRKQQLEVELRQVTQMRTEESVRYKQSLDDAAKTIQDKNKEIERLKQLIDKETNDRKCLEDENARLQRVQYDLQKANSSATETINKLKVQEQELTRLRIDYERVSQERTVKDQDITRFQNSLKELQLQKQKVEEELNRLKRTASEDSCKRKKLEEELEGMRRSLKEQAIKITNLTQQLEQASIVKKRSEDDLRQQRDVLDGHLREKQRTQEELRRLSSEVEALRRQLLQEQESVKQAHLRNEHFQKAIEDKSRSLNESKIEIERLQSLTENLTKEHLMLEEELRNLRLEYDDLRRGRSEADSDKNATILELRSQLQISNNRTLELQGLINDLQRERENLRQEIEKFQKQALEASNRIQESKNQCTQVVQERESLLVKIKVLEQDKARLQRLEDELNRAKSTLEAETRVKQRLECEKQQIQNDLNQWKTQYSRKEEAIRKIESEREKSEREKNSLRSEIERLQAEIKRIEERCRRKLEDSTRETQSQLETERSRYQREIDKLRQRPYGSHRETQTECEWTVDTSKLVFDGLRKKVTAMQLYECQLIDKTTLDKLLKGKKS

SEQ ID NO: 369 - DNA, 600 bp, Homo sapiens
agtcttggcggaggtgaccaaagccacgtaatgtccgtagttcgctcatccgtccatgccagatggattgtggggaaggtgattgggacaaaaatgcaaaagactgctaaagtgagagtgaccaggcttgttctggatccctatttattaaagtattttaataagcggaaaacctactttgctcacgatgcccttcagcagtgcacagttggggatattgtgcttctcagagctttacctgttccacgagcaaagcatgtgaaacatgaactggctgagatcgttttcaaagttggaaaagtcatagatccagtgacaggaaagccctgtgctggaactacctacctggagagtccgttgagttcggaaaccacccagctaagcaaaaatctggaagaactcaatatctcttcagcacagtgaagcgggagtggaagaaggatctaaagggaaaaactgacatgtttatgttatggaaaaagaaatttttctaagtttcatcacaaactgtgtccagtttctctgtggtgtttatgaaatagctaaaagcaaatgaagtaaagggcatactatggtttttcacaaaaaaaaaaaaaaaaa

SEQ ID NO: 370 - protein, 130 aa, Homo sapiens
MSVVRSSVHARWIVGKVIGTKMQKTAKVRVTRLVLDPYLLKYFNKRKTYFAHDALQQCTVGDIVLLRALPVPRAKHVKHELAEIVFKVGKVIDPVTGKPCAGTTYLESPLSSETTQLSKNLEELNISSAQ

SEQ ID NO: 371 - DNA, 793 bp, Homo sapiens
ccaagatggcggtgctgtcagctcctggcctgcgcggcttccggatccttggtctgcgctccagcgtgggcccggctgtgcaggcacgaggtgtccatcagagcgtggccaccgatggcccaagcagcacccagcctgccctgccaaaggccagagccgtggctcccaaacccagcagccggggcgagtatgtggtggccaagctggatgacctcgtcaactgggcccgccggagttctctgtggcccatgaccttcggcctggcctgctgcgccgtggagatgatgcacatggcagcaccccgctacgacatggaccgctttggcgtggtcttccgcgccagcccgcgccagtccgacgtcatgatcgtggccggcacactcaccaacaagatggccccagcgcttcgcaaggtctacgaccagatgccggagccgcgctacgtggtctccatggggagctgcgccaacggaggaggctactaccactattcctactcggtggtgaggggctgcgaccgcatcgtgcccgtggacatctacatcccaggctgcccacctacggccgaggccctgctctacggcatcctgcagctgcagaggaagatcaagcgggagcggaggctgcagatctggtaccgcaggtagcgccgccgccgccgccgccggagcctgtcgccgtcctgtccccagcctgcttgtgtcccgtgaggttgtcaataaacctgccctcgggctgccgccaaaaaaaaaaaaaaaaaaaaaaaaaaaaaaaaaaaaaaaaaaaaaaaaaa

SEQ ID NO: 372 - protein, 213 aa, Homo sapiens
MAVLSAPGLRGFRILGLRSSVGPAVQARGVHQSVATDGPSSTQPALPKARAVAPKPSSRGEYVVAKLDDLVNWARRSSLWPMTFGLACCAVEMMHMAAPRYDMDRFGVVFRASPRQSDVMIVAGTLTNKMAPALRKVYDQMPEPRYVVSMGSCANGGGYYHYSYSVVRGCDRIVPVDIYIPGCPPTAEALLYGILQLQRKIKRERRLQIWYRR

SEQ ID NO: 373 - DNA, 4570 bp, Homo sapiens
acttggcaaatccgaagattttccgggatctttcaaagcccatgggggctcagaccaaggaaaggaagctgaaatttatccagaggtttaaagaagttgagaaaactgaaggagacatgactgtccagtgccactactacacccactactcctcggccatcatcgtggcctcctacctggtccggatgccacccttcacccaggccttctgcgctttgcagggcggaagcttcgacgtggcagacagaatgttccacagtgtgaagagcacgtgggagtcggcctccagagagaacatgagtgacgtcagggagctgaccccagagttcttctacctgcctgagttcttaaccaactgcaacggggtagagttcggctgcatgcaggacgggactgtgctaggagacgtgcagctccctccctgggctgatggggaccctcggaaattcatcagcctgcacagaaaggccctggaaagtgactttgtcagtgccaacctccaccattggatagaccttatttttgggtacaagcagcaggggccagccgcagtggatgctgttaatatcttccacccctacttctacggtgacagaatggacctcagcagcatcactgaccccctcatcaaaagcaccatcctggggtttgtcagcaactttggacaggtgcccaaacagctctttaccaaacctcacccagccaggactgcagcagggaagcctctgcctggaaaggatgtctccacccccgtgagcctgcctggccacccacagccctttttctacagcctgcagtcgctgaggccctcccaggtcacggtcaaaggtgattccctggccatgcattgtttggtgtcctgtcccagggttgtcccttcagtggctgggttcctctggaggtccagcaccacatacctgggcaaagtattggggactgactttgaatggctgcatctccagtcacagccagattctaggggggtgtcatctctgggaagtgtctaggagctcctctgttagaccctaacttctgaagacccacgtctctctgtctttctgtctgtctctctcacacacatacacacacagacacctctttcaggcacacacacacatctctcttcctcttcctctcttttatacatgcacacacacatgtacacacacataccttctctcctcaagagaccagtggagagtcccaagtttcacaaggaaggattacagcctctgtgctttggccactggtcctcctaagcagggcaggggactaagctaagcactctaagcaggcagccagtagctaagaacatgtgctctggggcagatggcccaggagtgcattccagtcctactgcttcctgactgtgtgaccttgggcaagccattgaacctccttgttcccacggggattggaatagcattgaatggatgctactacagatttgtattgatgcttagataaatgagcctgcagagagttggtgaggaaaagatgaaaaacatgagaaataggttgagccagtgaagggagccatgtgatttagggagggaagagggtcactctggccctattattgagaaacagttcttccagggaccaggggctcctcaacaaggccagtcagcaagagcgcaatgagatgggccaccttcggtgcccagcacatagtggtgattattagtccatctcttctgaccataattcagtggcttccttggctgccaccaaggctcagagaggctctatagaagcaggagtccactggggtgggggtggttccactggggtgggggtggtcccaaccagcccaggagggaggatctcccagatggaagcagaagagagggtgaggctgggttcctagggccatgtatgtatgaagtcgggtgccagtgtcatctgaggacatgcactgccttggggaaatcccactacactgaacaacatgcaggtcccaaggagtatgaagttaagttttcaatggttttagtggtgtccttttttatccttgaagtccaagaacagtgtcattggcacaccccaccctggtagataaggtgctactgctcttggctctggggaccatgcctccatttgccccaggactggggatccgctgctgcattgaagtccctgggcagtcaggcacagcccctgccctcatggaaagggacatgaggtgcaaaccacatcaacagtaacaagggagctcaaatctcccatgtgggctccaggagactgatgcagatcttaccagccacgggtcctggggatccttcctgaggctcagtttcttcatgtgtaaggtatggaagacaatggccctgccctcaggcttgtgacagtgccatgaagtggtgtctgtcacacaggcaggcaacaagccagcgctgaggcaggagtcctggcagatgctggtgccactccgagcacacacactgggccttgctttaaggggcctggctttactctctccctttgatctgagcagccccagaaggtaagggccattgatgccacagtcccttccctatggggagagacatctcacagtcttatcctggagcctttcctgaatcctgctccctctcttcctcctgggtggtagggtcaggaagagggtggttctcccacttcacccagcacagggcaaggaagggagtggcccccaccaggaggaaggaaaggcccctacgtggtgggtatggtgtgcacagtcttagaaactaggctggcctcagtgttttgagtcaacaagctgcaccaggctctgtgccaggggacacacattgaaaggggcatggttttctctactccatgggaagaggctagggtctgaagagatggaatgacttcaccagcataaccagacttggaatgaggtctgggcagctccaaatcccgtgctgtgagccatattccagctggggctgggggtggctcccagagtggagctgagggaggatgggaattgtgcctccctgtgactcctgccccggggcccggctacagtgggtgctgtccttctgtgcataagttcaagtccagtgtgtctgcctgtcactcctgcccagggcccagctgcagtgggtgctgtccttccatgcttaagttcaagtccagtgtgtctgcctgtgactcctgcctgggggcccagctgtagtgggtgctgttcttccatgcataagttcgccatactaactggggtgtagatatgtacctcttttctctaggctcagagtcccccaaaggggccattggccacattgtctctactgagaagaccattctggctgtagagaggaacaaagtgctgctgcctcctctctggaacaggaccttcagctggggctttgatgacttcagctgctgcttggggagctacggctccgacaaggtcctgatgacattcgagaacctggctgcctggggccgctgtctgtgcgccgtgtgcccatccccaacaacgattgtcacctctgggaccagcactgtggtgtgtgtgtgggagctcagcatgaccaaaggccgcccgaggggcttgcgcctccggcaggccttgtatggacacacacaggctgtcacgtgcctggcagcgtcagtcaccttcagcctcctggtgagcggctcccaggactgcacctgtatcctgtgggatctggaccacctcacccacgtgacccgcctgcccgcccatcgggaaggcatctcagccatcaccatcagtgacgtctcaggcaccattgtctcctgtgcgggagcacacttgtccctgtggaatgtcaatggacagcccctggccagcatcaccacagcctggggcccagaaggagccataacctgctgctgcctgatggagggcccagcatgggacacaagccagatcatcatcaccgggagtcaagacggcatggtccgggtttggaagactgaggatgtgaagatgtctgttcctggacggccagcaggagaggagcccccggctcagcctccaagcccaagaggccacaagtgggagaagaacctggccttgagtcgagagctggacgttagcattgctttgacagggaagcccagcaaaaccagccccgcagtgactgctctggccgtgtccagaaaccacaccaaactcctggttggtgatgagagggggagaatattctgctggtctgcagatgggtaggaagagagaggcagcagaggctctggcacaacagtgccaggctgagggtggcagaggtgactggggcctgagctctgcctacagaagaaacccccagggcctccttccccacagttctcaaggaagggcctctggcaatcacagctctgcagcccaaccctctccatggccgatgggacttctatgaaaaggatgagcacacacactcggagggctgagcagcacgctggaaactgtgacttggtgatgcccagctgcacacgaaattacacatgactcaccttattaagggctattgcactgaaaaaaaaaaaagatgggtcgcttactggaaattattgtattgtctttattttattaaagcaactatgttttaaatgc

SEQ ID NO: 374 - DNA, 1621 bp, Homo sapiens
ttcgaatgaatgggaagacacggttgatgcagtggagagacatgtttgacattgcagttaaatggagaaggattgctgacccagaccagcccgtgctgtggttagatcaaatgccagcacgaagtcttagcagaggttttaacaaccacattaatttaatcaggggtcaggtgatcaacatgagatacctagaatattttgagaaaatacttcattttattaaagacagaattcttgtttatcatggagctaataatcctaaaggattgctggaagttcgggaagccctggaaaaggtacacaaagtagaagaccttcttccgattatgaagcagtttaatactaaaacgaaggatgggttcaccgtgaacacaaaagttcccagccttaaagaccaagggaaggaatatgatggattcacaatcacgattacaggagacaaagttggcaatatattattttctgtggaaactcaaaccacggaagaaaggacacaattatatcatgctgaaatagatgcactttataaagatttgacagcaaaaggaaaagtattgattctttcatcagaatttggggaggctgatgctgtctgcaacttaatcttatccttagtttattacttttataatttaatgccactctctcgaggatccagtgtaattgcttactcggtcatcgtgggagcactgatggcaagtggaaaagaagtagcaggaaaaattcccaaagggaagttagtcgactttgaagctatgacagcccctggttcagaggcctttagcaaagtcgccaaaagctggatgaacttgaaaagtatttcaccttcttataagactcttccatcagtttcagaaacgtttccaacgttaagatcgatgattgaggtgctaaacacagactcttctccacgttgtcttaagaaactctagttctgctgctgtatttatacaagtaaagggccggacctcttgcttcttaagttatttcttaaaacatggaattataaagaaattaggtcctctattacttttgataccaatttttataggaattgaatacttgaaatcattttctttacttttctgaaccataatgaaaatcatgaaagaggctttcggggggaaaaagctacttgacttggagggaaagcgtatgtattagccggcagcctgttggttcccacttataaagtcatataactccttccttacagtaaaaaaaattttcctcaacaactaaaatataatactgaagatgaacaaaaacaaaaccaaataggagtgtttgtattcctttagagatctggatatttttcaaagacttgctttttacgcacattgtgatagagcatcttttgttgactcacgtaacctccatgtgtgggtcctttgttttattagaaccatggaagaaggttcctgggccatcagtatgtgttgcagagctcacagccaggaacacttattttgaacaatgcagacagtacttgccagagtcccaaatgctgaattattgaaccatgtttttttttcctttgttgaaaaaaataaaccagggtgatttctataaatcaccagtttttggcattgaaaaaaaaaaaaaaaaaaaaaaaaaaaaa

SEQ ID NO: 375 - protein, 308 aa, Homo sapiens
MNGKTRLMQWRDMFDIAVKWRRIADPDQPVLWLDQMPARSLSRGFNNHINLIRGQVINMRYLEYFEKILHFIKDRILVYHGANNPKGLLEVREALEKVHKVEDLLPIMKQFNTKTKDGFTVNTKVPSLKDQGKEYDGFTITITGDKVGNILFSVETQTTEERTQLYHAEIDALYKDLTAKGKVLILSSEFGEADAVCNLILSLVYYFYNLMPLSRGSSVIAYSVIVGALMASGKEVAGKIPKGKLVDFEAMTAPGSEAFSKVAKSWMNLKSISPSYKTLPSVSETFPTLRSMIEVLNTDSSPRCLKKL

SEQ ID NO: 376 - DNA, 1798 bp, Homo sapiens
gtgccaaccaaaccctgaacagaggaggtggcggtggtggccctcgcctgtggcccccgtgctgcttgcactcgaactcgtcgccatggaggagctccaggagcctctgagaggacagctccggctctgcttcacgcaagctgcccggactagcctcttactgctcaggctcaacgacgctgccctgcgggcgctgcaagagtgtcagcggcaacaggtacggccggtgattgctttccaaggccaccgagggtatctgagactcccaggccctggttggtcctgcctcttctccttcatagtgtcccagtgttgtcaggagggcgctggtggtagcttggaccttgtgtgccaacgcttcctcaggtctgggcctaacagcctccactgcctgggctcactcagggagcgcctcattatttgggcagccatggattctatcccagccccatcatcagttcagggacacaacctgactgaagatgccagacatcctgagagttggcagaacacaggaggctattctgaaggagatgcagtatcacagccacagatggcactagaggaggtgtcagtgtcagatccactggcaagcaaccaaggacagtcactcccaggatcctcaagggagcacatggcacagtgggaagtgagaagccagacccatgttccaaacagagaacctgttcaggcactgccttcctctgccagccggaaacgtctggacaagaaacgttcagtgcctgtagccactgtagaactggaagaaaagaggttcagaactctgcctttagtgccaagccccctacaaggcctgaccaatcaggatttacaagagggagaagattgggagcaagaagatgaggacatggaccccagattagaacacagttcctcagttcaagaagattctgaatccccaagtcctgaagatataccagactacctcctgcaatacagggccatccacagtgcagaacagcaacatgcctatgagcaggactttgagacagattatgctgaataccgcatcctgcatgcccgtgttgggactgcaagccaaaggttcatagagctgggagcagagattaaaagagttcggcgaggaactccagaatacaaggtcctggaagacaagataatccaggaatataaaaagttcaggaagcagtacccaagttacagagaagaaaagcgtcgctgtgagtaccttcaccagaaattgtcccacattaaaggtctcatcctggagtttgaggaaaagaacaggggcagctgaagttatcaagggaatttttgagcctctgcttagtgaaacacaaaggaacaaagcagctataaactaaatagaatgcaactatctgcttttcttatgctgaccactggagtccatggtggcaagtagagagctgctctaggttcttgaggtttggttttcattattaatttttagggtatgggcactgtgcaaagactccatagctgtgcctaggagtctaggaaaagtgacagaggcttggcttttttacctttagttcagccaagtcattttcaagtcctgagaaatgacatcatcttcaggataaaataatgaggacattagacaaaccaaactaagtgaattttagcctggtagcctctctaaggaaacagtaataataacttctgataagagttaaaagaacttgtagcatacctggatataatgggaaagggcctgggtgttacccatgtactgaaaatgaacttttaccaacatggctaaaaaattaaaaaaaaaaaaaaaaaaaaaaaaaaa

SEQ ID NO: 377 - protein, 397 aa, Homo sapiens
MEELQEPLRGQLRLCFTQAARTSLLLLRLNDAALRALQECQRQQVRPVIAFQGHRGYLRLPGPGWSCLFSFIVSQCCQEGAGGSLDLVCQRFLRSGPNSLHCLGSLRERLIIWAAMDSIPAPSSVQGHNLTEDARHPESWQNTGGYSEGDAVSQPQMALEEVSVSDPLASNQGQSLPGSSREHMAQWEVRSQTHVPNREPVQALPSSASRKRLDKKRSVPVATVELEEKRFRTLPLVPSPLQGLTNQDLQEGEDWEQEDEDMDPRLEHSSSVQEDSESPSPEDIPDYLLQYRAIHSAEQQHAYEQDFETDYAEYRILHARVGTASQRFIELGAEIKRVRRGTPEYKVLEDKIIQEYKKFRKQYPSYREEKRRCEYLHQKLSHIKGLILEFEEKNRGS

SEQ ID NO: 378 - DNA, 3243 bp, Homo sapiens
gggcttcgtgttcctgggtgctgaccgtgcactccccgccgcccgaggacttagagctctggaagtagctctccagcttccttcgtactcgggggccggacttgtacacccgcacgaggagcggggacggcgggcgcagaagtgggccaccatatctggaaactacagtctatgctttgaagcgcaaaagggaataaacatttaaagactcccccggggacctggaggatggacttttccatggtggccggagcagcagcttacaatgaaaaatcaggtaggattacctcgctctcactcttgtttcagaaagtctttgctcagatctttcctcagtggagaaaggggaatacagaagaatgtctcccctacaagtgctcagagactggtgctcttggagaaaactatagttggcaaattcccattaaccacaatgacttcaaaattttaaaaaataatgagcgtcagctgtgtgaagtcctccagaataagtttggctgtatctctaccctggtctctccagttcaggaaggcaacagcaaatctctgcaagtgttcagaaaaatgctgactcctaggatagagttatcagtctggaaagatgacctcaccacacatgctgttgatgctgtggtgaatgcagccaatgaagatcttctgcatgggggaggcctggccctggccctggtaaaagctggtggatttgaaatccaagaagagagcaaacagtttgttgccagatatggtaaagtgtcagctggtgagatagctgtcacgggagcagggaggcttccctgcaaacagatcatccatgctgttgggcctcggtggatggaatgggataaacagggatgtactggaaagctgcagagggccattgtaagtattctgaattatgtcatctataaaaatactcacattaagacagtagcaattccagccttgagctctgggatttttcagttccctctgaatttgtgtacaaagactattgtagagactatccgggttagtttgcaagggaagccaatgatgagtaatttgaaagaaattcacctggtgagcaatgaggaccctactgttgctgcctttaaagctgcttcagaattcatcctagggaagagtgagctgggacaagaaaccaccccttctttcaatgcaatggtcgtgaacaacctgaccctccagattgtccagggccacattgaatggcagacggcagatgtaattgttaattctgtaaacccacatgatattacagttggacctgtggcaaagtcaattctacaacaagcaggagttgaaatgaaatcggaatttcttgccacaaaggctaaacagtttcaacggtcccagttggtactggtcacaaaaggatttaacttgttctgtaaatatatataccatgtactgtggcattcagaatttcctaaacctcagatattaaaacatgcaatgaaggagtgtttggaaaaatgcattgagcaaaatataacttccatttcctttcctgcccttgggactggaaacatggaaataaagaaggaaacagcagcagagattttgtttgatgaagttttaacatttgccaaagaccatgtaaaacaccagttaactgtaaaatttgtgatctttccaacagatttggagatatataaggctttcagttctgaaatggcaaagaggtccaagatgctgagtttgaacaattacagtgtcccccagtcaaccagagaggagaaaagagaaaatgggcttgaagctagatctcctgccatcaatctgatgggattcaacgtggaagagatgtgtgaggcccacgcatggatccaaagaatcctgagtctccagaaccaccacatcattgagaataatcatattctgtaccttgggagaaaggaacatgacattttgtctcagcttcagaaaacttcaagtgtctccatcacagaaattatcagcccaggaaggacagagttagagattgaaggagcccgggctgacctcattgaggtggttatgaacattgaagatatgctttgtaaagtacaggaggaaatggcaaggaaaaaggagcgaggcctttggcgctcgttaggacagtggactattcagcaacaaaaaacccaagacgaaatgaaagaaaatatcatatttctgaaatgtcctgtgcctccaactcaagagcttctagatcaaaagaaacagtttgaaaaatgtggtttgcaggttctaaaggtggagaagatagacaatgaggtccttatggctgcctttcaaagaaagaagaaaatgatggaagaaaaactgcacaggcaacctgtgagccataggctgtttcagcaagtcccataccagttctgcaatgtggtatgcagagttggctttcaaagaatgtactcgacaccttgcgatccaaaatacggagctggcatatacttcaccaagaacctcaaaaacctggcagagaaggccaagaaaatctctgctgcagataagctgatctatgtgtttgaggctgaagtactcacaggcttcttctgccagggacatccgttaaatattgttcccccaccactgagtcctggagctatagatggtcatgacagtgtggttgacaatgtctccagccctgaaacctttgttatttttagtggcatgcaggctatacctcagtatttgtggacatgcacccaggaatatgtacagtcacaagattactcatcaggaccaatgagaccctttgcacagcatccttggaggggattcgcaagtggcagccctgttgattaatctctacatcattttaacagctggtatggccttaccttgggtgaactaaccaaataatgaccatcgatggctcaaagagtggcttgaatatatcccatgggttatctgtatggactgactgggttattgaaaggactagccacatactagcatcttagtgcctttatctgtctttatgtcttggggttggggtaggtagataccaaatgaaacactttcaggaccttccttcctcttgcagttgttctttaatctcctttactagaggagataaatattttgcatataatgaagaaatttttctagtatataacgcaggccttttattttctaaaatgatgatagtataaaaatgttaggataacagaatgattttagattttccagagaatattataaagtgctttaggtatgaaaataaatcatctttgtctgattaaaaaaaaaaaa

SEQ ID NO: 379 - protein, 854 aa, Homo sapiens
MDFSMVAGAAAYNEKSGRITSLSLLFQKVFAQIFPQWRKGNTEECLPYKCSETGALGENYSWQIPINHNDFKILKNNERQLCEVLQNKFGCISTLVSPVQEGNSKSLQVFRKMLTPRIELSVWKDDLTTHAVDAVVNAANEDLLHGGGLALALVKAGGFEIQEESKQFVARYGKVSAGEIAVTGAGRLPCKQIIHAVGPRWMEWDKQGCTGKLQRAIVSILNYVIYKNTHIKTVAIPALSSGIFQFPLNLCTKTIVETIRVSLQGKPMMSNLKEIHLVSNEDPTVAAFKAASEFILGKSELGQETTPSFNAMVVNNLTLQIVQGHIEWQTADVIVNSVNPHDITVGPVAKSILQQAGVEMKSEFLATKAKQFQRSQLVLVTKGFNLFCKYIYHVLWHSEFPKPQILKHAMKECLEKCIEQNITSISFPALGTGNMEIKKETAAEILFDEVLTFAKDHVKHQLTVKFVIFPTDLEIYKAFSSEMAKRSKMLSLNNYSVPQSTREEKRENGLEARSPAINLMGFNVEEMCEAHAWIQRILSLQNHHIIENNHILYLGRKEHDILSQLQKTSSVSITEIISPGRTELEIEGARADLIEVVMNIEDMLCKVQEEMARKKERGLWRSLGQWTIQQQKTQDEMKENIIFLKCPVPPTQELLDQKKQFEKCGLQVLKVEKIDNEVLMAAFQRKKKMMEEKLHRQPVSHRLFQQVPYQFCNVVCRVGFQRMYSTPCDPKYGAGIYFTKNLKNLAEKAKKISAADKLIYVFEAEVLTGFFCQGHPLNIVPPPLSPGAIDGHDSVVDNVSSPETFVIFSGMQAIPQYLWTCTQEYVQSQDYSSGPMRPFAQHPWRGFASGSPVD

SEQ ID NO: 380 - DNA, 1763 bp, Homo sapiens
aagcaattaacaaagaaggaacatttacagttcagttttatgatggagtaattcagttgtttaaaaagaatgcacattaaagccatgcccgaggatgctaaggggcaggtgaaatcccagcatccactaagctggtgttgtcctatcgacccagctggatcgtgtaaccagtctatgggaagtgaggattggatagctttagtcaaagcagctgctgcagctgcagccaagaacaaaacagggagtaaacctcgaaccagcgctaacagcaataaagataaggataaagatgagagaaagtggtttaaagtaccttcaaagaaggaggaaacttcaacttgtatagccacaccagacgtagagaagaaggaagatctgcctacatctagtgaaacatttggacttcatgtagagaacgttccaaagatggtctttccacagccagagagcacattatcaaacaagaggaaaaataatcaaggcaactcgtttcaggcaaagagagctcgacttaacaagattactggtttgttggcatccaaagctgttggggttgatggtgctgaaaaaaaggaagactacaatgaaacagctccaatgctggagcaggcgatttcacctaaacctcaaagtcagaaaaaaaatgaagctgacattagcagttctgccaacactcagaaacctgcactgttatcctcaactttgtcttcagggaaggctcgcagcaagaaatgcaaacatgaatctggagattcttctgggtgtataaaaccccctaaatcaccactttccccagaattaatacaagtcgaggatttgacgcttgtatctcagctttcttcttcagtgataaataaaactagtcctccacagcctgtgaatccccctagacctttcaagcatagtgagcggagaagaagatctcagcgtttagccaccttacccatgcctgatgattctgtagaaaaggtttcttctccctctccagccactgatgggaaagtattctccatcagttctcaaaatcagcaagaatcttcagtaccagaggtgcctgatgttgcacatttgccacttgagaagctgggaccctgtctccctcttgacttaagtcgtggttcagaagttacagcaccggtagcctcagattcctcttaccgtaatgaatgtcccagggcagaaaaagaggatacacagatgcttccaaatccttcttccaaagcaatagctgatggaagaggagctccagcagcagcaggaatatcgaaaacagaaaaaaaagtgaaattggaagacaaaagctcaacagcatttggtatcaggagttgggatttctcagcactgctaatgaagatcccctcttatagtccaataagcttatcaggacttccagagtcatgacatgaacagtttaattgaacccatccactctgggcaggtgactggaatagctgattaaaacataaatgctgcttttaggttaaccacaaaggaacaactcaggatcagtcgtgattgctaaagtattcacttttatcttttaggtaagagaaaagaaaaagataaggaaagaagagagaagagagacaaagatcactacagaccaaaacagaagaagaagaggcacctctggtactgaagattcctgctgattttgagaactggatggagaatactttcccatcaggggctggagagggagaagaaacctttttctacagaatcatcaggcatgggtaaggtggctaacgctgagatctctt

SEQ ID NO: 381 - protein, 443 aa, Homo sapiens
MHIKAMPEDAKGQVKSQHPLSWCCPIDPAGSCNQSMGSEDWIALVKAAAAAAAKNKTGSKPRTSANSNKDKDKDERKWFKVPSKKEETSTCIATPDVEKKEDLPTSSETFGLHVENVPKMVFPQPESTLSNKRKNNQGNSFQAKRARLNKITGLLASKAVGVDGAEKKEDYNETAPMLEQAISPKPQSQKKNEADISSSANTQKPALLSSTLSSGKARSKKCKHESGDSSGCIKPPKSPLSPELIQVEDLTLVSQLSSSVINKTSPPQPVNPPRPFKHSERRRRSQRLATLPMPDDSVEKVSSPSPATDGKVFSISSQNQQESSVPEVPDVAHLPLEKLGPCLPLDLSRGSEVTAPVASDSSYRNECPRAEKEDTQMLPNPSSKAIADGRGAPAAAGISKTEKKVKLEDKSSTAFGIRSWDFSALLMKIPSYSPISLSGLPES

SEQ ID NO: 382 - DNA, 2318 bp, Homo sapiens
gggggaagatggcggacgtgcttagcgtcctgcgacagtacaacatccagaagaaggagattgtggtgaagggagacgaagtgatcttcggggagttctcctggcccaagaatgtgaagaccaactatgttgtttgggggactggaaaggaaggccaacccagagagtactacacattggattccattttatttctacttaataacgtgcacctttctcatcctgtttatgtccgacgtgcagctactgaaaatattcctgtggttagaagacctgatcgaaaagatctacttggatatctcaatggtgaagcgtcaacatcggcaagtatagacagaagcgctcccttagaaataggtcttcagcgatctactcaagtcaaacgagctgcagatgaagttttagcagaagcaaagaaaccacgaattgaggatgaagagtgtgtgcgccttgataaagagagattggctgcccgtttggagggtcacaaagaagggattgtacagactgaacagattaggtctttgtctgaagctatgtcagtggaaaaaattgctgcaatcaaagccaaaattatggctaagaaaagatctactatcaagactgatctagatgatgacataactgcccttaaacagaggagttttgtggatgctgaggtagatgtgacccgagatattgtcagcagagagagagtatggaggacacgaacaactatcttacaaagcacaggaaagaatttttccaagaacatttttgcaattcttcaatctgtaaaagccagagaagaagggcgtgcacctgaacagcgacctgccccaaatgcagcacctgtggatcccactttgcgcaccaaacagcctatcccagctgcctataacagatacgatcaggaaagattcaaaggaaaagaagaaacggaaggcttcaaaattgacactatgggaacctaccatggtatgacactgaaatctgtaacggagggtrcatctgcccggaagactcagactcctgcagcccagccagtaccaagaccagtttctcaagcaagacctcccccaaatcagaagaaaggatctcgaacacccattatcataattcctgcagctaccacctctttaataaccatgcttaatgcaaaagaccttctacaggacctgaaatttgtcccatcagatgaaaagaagaaacaaggttgtcaacgagaaaatgaaactctaatacaaagaagaaaagaccagatgcaaccagggggcactgcaattagtgttacagtaccttatagagtagtagaccagccccttaaacttatgcctcaagactgggaccgcgttgtagccgtttttgtgcagggtcctgcatggcagttcaaaggttggccatggcttttgcctgatggatcaccagttgatatatttgctaaaattaaagccttccatctgaagtatgatgaagttcgtctggatccaaatgttcagaaatgggatgtaacagtattagaactcagctatcacaaacgtcatttggatagaccagtgttcttacggttttgggaaacattggacaggtacatggtaaagcataaatcgcacttgagattctgaattatttggctcctccatttctggaaattgagactcaagctttatgaatttatcaagaacttaaaaatgaagaaggtcacagattgatcttttataagaccttatttgatgctttgtgcttcaaggagatgatacctgtcatccatataagcaaactttttggcttacaactatttttttaatattagccttctagtctgtaatggaaattgtatattttgatagaagttttttctccattggttaaattagcattacttaaaatttgtttctttagaaaataaatgcaggttataaatgtgtgtatatttagagattataaggctctctgagccatcttctgatttttcattgctctataattctttttactgaaaatactatgttatgaatggtattaaattttagtctctggaacatccaaaaccaagcaaagggatgtgactattttgaatgaatcagaatgtcaacttgtatgtacactatatctacacttactcattatttaaaaagaataatgaaaaatctagatcaattcttcaatttgattgaactgttcagccttttcaagatttctttatttacaaatgattacatttaaatgaatgtacattcttctcactgactttggtgattttgaaacctagaatgatgtgtttctatctgtaatatctttccatttgaaaaaaatctcaaaacacagattaaaaccac

SEQ ID NO: 383 - protein, 531 aa, Homo sapiens
  Unsure 327: Unknown amino acid
MADVLSVLRQYNIQKKEIVVKGDEVIFGEFSWPKNVKTNYVVWGTGKEGQPREYYTLDSILFLLNNVHLSHPVYVRRAATENIPVVRRPDRKDLLGYLNGEASTSASIDRSAPLEIGLQRSTQVKRAADEVLAEAKKPRIEDEECVRLDKERLAARLEGHKEGIVQTEQIRSLSEAMSVEKIAAIKAKIMAKKRSTIKTDLDDDITALKQRSFVDAEVDVTRDIVSRERVWRTRTTILQSTGKNFSKNIFAILQSVKAREEGRAPEQRPAPNAAPVDPTLRTKQPIPAAYNRYDQERFKGKEETEGFKIDTMGTYHGMTLKSVTEGXSARKTQTPAAQPVPRPVSQARPPPNQKKGSRTPIIIIPAATTSLITMLNAKDLLQDLKFVPSDEKKKQGCQRENETLIQRRKDQMQPGGTAISVTVPYRVVDQPLKLMPQDWDRVVAVFVQGPAWQFKGWPWLLPDGSPVDIFAKIKAFHLKYDEVRLDPNVQKWDVTVLELSYHKRHLDRPVFLRFWETLDRYMVKHKSHLRF

SEQ ID NO: 384 - DNA, 3641 bp, Homo sapiens
ctcccaccccgtcctcttggctcggaagggagacctggttggctctcctccatgacagccagccccgctgtgcacaggggtggggctcgggatccctccctgcaccctgatgtttattaactgtagatagtgaatgtcaagttgacaggtaccttctcagggatttatatataaatatagttagaggaagaagttgaagtctattttactactttttagtgtttgagtaaattgatgctttaactggacagaacaacatatttctcagacaatgtcgatgctgctgatgacgaactgagatgcctggagctcacccttgatggagacttcctgtggtgatgggagatgggggactctggtggcagaaatggcttggggtaggtgtgaagttgcttcagtccctctgagttgcctcttgtggatggaacgtgtgtatcgaacaactaatgaaatgcacctccgtgtgcatggaggcggctgatgagaatacgagataggccagtcctcgcgtcttccctccagaaccggccgctcccggtctgacgttggagcacgtgaactaagagtgacaattttttctacttgcttctgtgaataaagtgttctacagtcagcccagcactaaactcaccagaaaagaggagggaacagcacggagccattcatctggaattactcgatgtgcagaggctgccccttggccgcacttgggaacatcgtggacatcttccttcctctcaggctcctcctgacagactcctggcagcactggagacctcaggactatggagatcagaattgtaatggctttgtcatctcagtgtggccactcctgaggcaagaggctcctcctgggagcaggagagagagagtttgtgatgttggttggaaaataggatttatggatgcaggagggccgtgctaggcccctctgcccgcttctctccctgctgttggcggtgaccaggtctcaggagcggagacgaggctgttgtgagtgaaacagaagcccctggcatagggccagaccctaggcctgaaaaggatgcaaagcctgctgttttcaggctgttgggaagaatcgtgcgtaccgagtgattatgatgaaacgtatcccagagaggaaatgaatgggacctgaaaagtgggtctgccacatccctggtagcccgcctccaagagcactacactccccccagccccaccggccacactacatgacgtgggaaggctgtccgttcatccttaccctggggactcaagtgtgctctgcggagtgagtcacagccctgatgtgcaccctgcactactctttccccaggtgcgccggagacgcaggcttgctcatttccgtcctgacacagctcgctgttcctgcggtggtcagagtccccctgtgctgtgtcagctcctggacactactagtctttcacatgataaagcgcgagcactttttcgcttttgcagtatttggggaaattctaacacatttcccggggatttgcccaggtccctccacctcccacggtgggtaactgtgtggattctgcacctggcaatcggcgctcccctttggaaacacctgggggccctgtttcttccagcctggtccttggtttctaccccagccgctttcagccggcacctgcatgggactgcctggagggccacggtccagggaaggacaggtgggaccctgaccatgacagatctttctaaaacaataaagtcccattgatgacaactgcagtgggatgaatgccattgcagcggtcatgctgggagctgccgagagcttacaacaaaagcagttcctctcaagacactgcttgcatcttccctccacgcctctcggtgcatttggaacttgtttatgcgctggtataactcgagtcagctgcttatttctgtgcccttgcactcacaggttccttcattaacattttaaataagtggctaaaaaaactcctctggaggttgtttttgaaagagacaggaaaaagaaacacacagtacctggattgttttgacttattttcaagcgactcagctgaaagccggtgttgcatacacaatttcctcacgctgacccagcctgactaagacttgataaaaggcacagcccttggcagcaggcagtgccaatgtggacagtgtacactaagctgtgagtgtgtgcacgggcgagcacatgtatgtgtactcatacatccagatgaactaaagggacactgggctttgtgctggcaaaggttacgatgctgctgtagcttggctgtgggccccaggcagtgtcagatggaacctgctttgatggcgtgttgttcagtgtactcagtggggtctcacatggcccgaggacccactgtgagcactccgcccgctgtggcacagaacacggctggggtcatcacagcccaggtctttattgaaaggcggctcatatagaacccatttggccaggtctgggccatctctctgcctctgccctatcttggctgcctggaggggcccaggcccaagaggattctttacccctggaagagctccccaggcattcagcctatggcccttgacatttggctgcaggttaccgtcagaatcaacaccatatcctgaggaagccctggtatttccccaagtctgcctatgtattagacactctaatcaatgctaacacagttcagtttttgagggaactagttttgtcataatactacacccctctattgtttttaaataagaaaaaaaaaaaccccacgaaactttccatcaaagcaatggtccgtgttggcctgatgctttaagaagtttgaggaggtaggtatggaggcaccttaacaccagtttttgagcagaagttctagaagctgatttagaactacacagctatggatacacctgatgaaaaccgcaaaaggcgatgacaggcccagaaatatgaccagcaagcccgtgagcctttggggcatccgactgaatttgaaaataataccccattcagatgaacattaaaagccaatgtactggaattctctttgttctgcccgacatttgggggtgtccaaggacctgtgtttttaacaaagatgactttatgaccgttctaaggattgaacagattcctgcacagggtgccaggtttcaagttaggtcctcttagtataagctctctttttttctgaatgtaaacctatttgcattgtcatttctaataatccagtaggtttctggatattgtaaagatactgagtacagatataactgtgtaaatttcatagtgttttattttgaggtgagagttttgttatagtttataaaagatattttcctattcagacctcagggctattttgggacctacaaataaatgtgattcccagcagcttcaatttttgatattcaaaaagttaataatctttaagctaaatataatgtgatatgattcagaaaaaaatgtttttcccttttaacttctaacaaattatgtatctaatgtttaaaaaatatggaaaaaagggataatgtaaaaatgtgggagaattgtggctaaagaataaaaaatcacttgttaaaacgcattcttatggtacaaatgtgtgatatttaaataaacttaagtgtgtataaattagagaatg

SEQ ID NO: 385 - protein, 39 aa, Homo sapiens [sequence omitted]

SEQ ID NO: 386 - DNA, 3241 bp, Homo sapiens
ttccagctcacttgcggtggcagcacaacttagggaaataataccatccagtgctttgcctaatggcacagttcagcatatcctcatgccagatgatgaaggtgaaggtgaattgtgttggaaaaaagtagacttaggggacatgaagaatgtggatgtcttatctttcagtcatgctccttcattcaattttctttctaattcatgttggtctaaaccaaaggaagataaagcagtagatacatcagatttggaagttgcagaagatcctatgggcctccaaggaatagatctgatcacagcagcattgcttttttgtctaggagattctccaggagggaggggtatatctgatagccgcatggctgatatttatcacattgacgttgggactcagactttttcacttccatctgcaatattagctacaagtacaatggttggggagatagcttcagcttcagcttgtgatcatgccaatccacagctttcaaatccaagtccgtttcagacacttgggctggatttagtattggaatgtgtcgctaggtaccaacccaagcagcgttcaatgtttacctttgtgtgtggacagttatttagaaggaaagaattttcttcccactttaagaatgtgcatggtgacattcatgctggactcaatggctggatggaacagaggtgccctttagcttactatggttgtacctattctcagcgtagattttgtccatcaatacaaggagcaaagattatacatgaccgccatttgaggtcatttggagttcagccatgtgtatctacagtattagtggagcctgctagaaactgtgtgttgggattacataatgaccatctaagtagtcttccttttgaggtcctgcagcatattgcaggctttctcgatggcttcagcttatgtcagctctcatgtgtatccaagttaatgagggatgtgtgtggcagcctgcttcagtctcgtggcatggtcatactgcagtgggggaaaaggaagtatccagaaggaaattcatcatggcagataaaagaaaaggtatggcgatttagtactgcattttgttctgttaatgaatggaaatttgctgacatcctaagcatggcagaccacttgaagaaatgcagttacaatgttgtcgagaaacgggaggaagcaatccctttgccatgtatgtgtgtgacacgagaactcactaaagaaggacgttcactacgctcagttttaaaacctgtactttaaaagttgtaatattactagcacatatatgcaagcacctagtataatttctttgtaatatgtgaaactttattaatgtattaaatattacaactagctaaatttattgtcactgtgtatataatgttttgaagtgacatctatttttataaagtactgtttagttggaaaaagttgccttaatgtttgaaatgtgtgaaatttttggaacttgctggacagggtgatttaatttttagctacataattttaagaattagtattttcagtggtgtgcatattttggttcttaaatttttgcttcttaaactaaaaaaatcctgaccaatttatttgttgttttctgtgggttgcgacccatgcaatcaaaaagcaaaattttgattgagattttttacagcataggtttttcatataaaaatattctgaatttgttaagcactgccataatatcattataatgtttttgtcttttagtgcttccctatacaattgttaatgcacaaatgatctctaatatatacttacatacgtaaaatcataaagtttggtaatgcagtttatcgttttaaaaataatccacaaagatgtttttatctcacatacttacaactcaacacacagagtgaccatgtgcagctttcttttttgttagatgccacatccgaagactcatcgcagtgtgttatatgacaggacaaagcaaaaacaaacaaaaagcaagcctgtgaatataatttaatttgaaactgctcctggtattatatatttgctagttatctaatgttttaaaagaaaatatacctcatttaggtttgaattgggcgtattgtgtaaatttcaaatattcagaatgcaaagggcttgactattaaatgtttgcctttgatgtttataaacattacaactatgttgttttaagacatttaaaaacgtgaaatttgttatctttgtaaaatgacaatcatgtagaaacctgtcttggttgacaatctctttgaaacatttccgagttaatttcccataggcttcaccaccaagaaagtaagaattgcatctttacataatgatcaaggtataatggaaaaatatacctattcttgaagtagtttattatagttttcaaattgatttataccattattaacctgatgtggtctgcttaaaaaatgaatatatcagtatttagaaataaattgcaaaggtgggaatatatacttaaataatttgtcttaagtaaattagcatttggtagtctgaaatggtgacagattacttgttaaaattgtgaaaactctgttgtgtcctctcttcctacatttgtccctgagagtactccacgattactaggttcttgattcccttatatggcaatcaggcagaggcgttccttaagcattagagagttctgaagcttaagatttgttttggttggatgaagtccttagtacagttgaaaaacagagcattaaagactaatcaattgttttgcctcaccagtcattttaaatagtagaatacttatttctcagtgcttaaaatttctttttcaactgtgagattgaataaacagtctctatttctgtggaaaaaacaacagaaaagagatattaaataccataaaatgtaactctgccttttaaagttttgctgaagaatgtgtctgtggttaggatagcacaagcattaacttttgttttatagttatgctttttaaaattcattgtttttaaatttagacttcttatttccacactggattatgagatacttaacaatttttccaccttatatttcttttacacattttgctgttctcttttttgttattgttatgccaccataccattttgttaaaatgttttctttgtgaaacatttgttcaagttctaataaaattaatgttttcccttaacatggctcaataacttaaaaacgttcatttaaataaaattttaatacttgtttgacaaaaaaaaaaaaaaa

SEQ ID NO: 387 - protein, 390 aa, Homo sapiens
MPDDEGEGELCWKKVDLGDMKNVDVLSFSHAPSFNFLSNSCWSKPKEDKAVDTSDLEVAEDPMGLQGIDLITAALLFCLGDSPGGRGISDSRMADIYHIDVGTQTFSLPSAILATSTMVGEIASASACDHANPQLSNPSPFQTLGLDLVLECVARYQPKQRSMFTFVCGQLFRRKEFSSHFKNVHGDIHAGLNGWMEQRCPLAYYGCTYSQRRFCPSIQGAKIIHDRHLRSFGVQPCVSTVLVEPARNCVLGLHNDHLSSLPFEVLQHIAGFLDGFSLCQLSCVSKLMRDVCGSLLQSRGMVILQWGKRKYPEGNSSWQIKEKVWRFSTAFCSVNEWKFADILSMADHLKKCSYNVVEKREEAIPLPCMCVTRELTKEGRSLRSVLKPVL

SEQ ID NO: 388 - DNA, 1482 bp, Homo sapiens
gaggcgccggcggccacgccgcggaaggcgcgggccgagcagagccgggcgttggagcccgcgcgcgcatggaggcgttgccggcagccccctgagggcagcggggagacaagacccggcgacctcgcgcatccctcgagccgccacgcgctctcgccaccgggcggcgacgggccgcggagccggcgcggccatggcgacgggcggccagcagaaggagaacacgctgcttcacctcttcgccggcgggtgtggaggcacagttggtgctattttcacttgtccactagaagtcattaagacacggttgcagtcttcaagattagctctccggacagtctactatcctcaggttcatctggggaccattagtggagctggaatggtgagaccaacatccgtgacacctggactctttcaggttctgaagtcgatcttggagaaagagggaccaaagtcactttttagaggcttgggtccaaatttggttggagttgcaccatcaagggctgtatactttgcatgttactccaaagccaaagagcaatttaatggcattttcgtgcctaacagcaatattgtgcatattttctcagctggctctgcagcttttatcacaaattccttaatgaatcctatatggatggttaaaacccgaatgcagctagaacagaaagtgaggggctctaagcagatgaatacactccagtgtgctcgttacgtttaccagaccgaaggcattcgtggcttctatagaggattaactgcctcgtatgctggaatttccgaaactataatctgctttgctatttatgaaagtttaaagaagtatctgaaagaagctccattagcctcttctgcaaatgggactgagaaaaattccacaagtttttttggacttatggcagctgctgctctttctaagggctgtgcctcctgcattgcttatccacacgaagtcataaggacgaggctccgggaagagggcaccaagtacaagtcttttgtccagacggcgcgcctggtgttccgggaagaaggctaccttgccttttatagaggactgtttgcccagcttatccggcagatcccaaatactgccattgtgttgtctacttatgagttaattgtgtacctgttagaagaccgtactcagtaacaggccggaaaattgtgctctagaagaataaaactgaaaaactctagagaattttttttccccattgatgtttagaaagtttgagactgaaacaggaaaggccataaaatatctggttcatatcacctgttggacatttccttttggattcatgctttctggaaggtttaaattcattaacgttaatagttaattataacttttttttaacttaagaggattcagggttaagcaccaactaaattaaatcatgctatttaatttaagtataaaaaaaaaaaaaaaaaaaaaaaaaaaaaaaaaaaaaaaaaaaaaaaaaaacc

SEQ ID NO: 389 - protein, 321 aa, Homo sapiens
MATGGQQKENTLLHLFAGGCGGTVGAIFTCPLEVIKTRLQSSRLALRTVYYPQVHLGTISGAGMVRPTSVTPGLFQVLKSILEKEGPKSLFRGLGPNLVGVAPSRAVYFACYSKAKEQFNGIFVPNSNIVHIFSAGSAAFITNSLMNPIWMVKTRMQLEQKVRGSKQMNTLQCARYVYQTEGIRGFYRGLTASYAGISETIICFAIYESLKKYLKEAPLASSANGTEKNSTSFFGLMAAAALSKGCASCIAYPHEVIRTRLREEGTKYKSFVQTARLVFREEGYLAFYRGLFAQLIRQIPNTAIVLSTYELIVYLLEDRTQ

SEQ ID NO: 390 - DNA, 1576 bp, Homo sapiens
gaccaggcctcctgattgtccttttgtgggctattctatactctctctcataagtcccacaaaactgaggtagagcacacgtttcctatacactggctttttattcctaattgaaaagtagtttactttttaagaaactggtttttactttattcttatcatccttttccaagagctttcacaggcataactaatttgacatcagcagaactgatttcatcatcaggcctaggttactcactactgcttctctttgaagttgtgaggctgggagatgcacaacaccgacgagggagatgtggtcacagaggcatgacaaagttcaagcttcagaaagtagccaatctaatcaatattctcacgctcaagacaaaattgatcagtgtaaacagatatagtaagttcgtccaggtcacaggagtcagtttcactctcacatcttgtcatttcaacgacgtgggctcctcactaaacaatgtttggcttagaagtagattctatagagttttattatggacaatgtccagtgtcattgccaatactctccaaaatgatttgagccatgaagtacagggaggagaagagtatttgttgaacacttgtaaatgagtgcttttcttccataatagcacacatctaggtattttgcccaatttgcagatgaggcaaaaatttggagtatgaatttcaaagaagtcgaacaggctagatgagtgcagagatggagagttaatcaaagggagtctgctgtaaaactcctcccacatgtgcaaattggccaatatgaaagcaatgaatatttgacaaattgaagttttctgctacttcaccaattttctcaagggctttgattcagttttctatatcagaaggtaaaaggcgagaggcttccatggctgcctgtcaacagggtttgtggagagaaggggctgggaaccctgggcaagcagcactttcagcaataaacagtatcctcaggggcccacagagggaagatggtttcagtgccaaaggcttgagtccccttaattttttcattccacttcactcatcacctgtctcctttctatgctagcaaaagaacaattattcatagatggtaaaattatttatagagccggtgtaattaaaaagaaaaaaaaagaaaagaaacacctgatgcaaaattcttccattgcaaggtgagaagatgaaaatccaagtagctaagtggctttctcaagctcacaaatctataattcagtctcttacatctatcagaaacatgttccgccttatcctggtctctgaaaacaaaacatagtgtctccaaagcattaaatggtttttgatgtttgatataaaaaaggacatgtccccagaaattattcccctgcataaaactttagaaaatgatgcttgaaggtcactagaagttgattacttaatgacagccagtaaggtacaaacatacacagagccaaattctgggagatgaaaaatggaaaaaaaaaatacagattcaaccagtgcttcttgtcaacacactactctgagatttttcttattttaatcttatggtctagagtagtattag

SEQ ID NO: 391 - DNA, 1993 bp, Homo sapiens
actcatttataccaggaaacagacaagagaacaagaggctgccgaagacaaaacttctctgcaagcacctgtgcacagcaatgtgcgtgggcatctgtgagaagaagagaatctgtgaagtttgagcaagcggccttcccaagatgtaccgaatatctcaactgatgtcaacaccagtagcaagttcttccaggttggaaagagaatatgctggagagctgtctcccacgtgcattttcccaagtttcacctgtgattccctggatggttaccattcttttgaatgcggctccatagatcccctgacaggctcccactatacctgtcgccgaagtcccagactcctcaccaatggctactatatttggactgaagacagcttcctgtgcgacaaagatggcaacataactctgaacccatcccagaccagcgttatgtataaggagaacttagttagtacctccaaatcttggctgcatggaagtatctttggtgacatcaactcttctccaagtgaagacaactggttgaaggggaccaggaggttggacacagaccattgcaatggaaatgcagatgatttagactgttcttctctgactgatgactgggagtcagggaagatgaatgcagagtctgtgatcacctcctcttccagccacatcatatctcagcctcctggaggaaactcccatagcttgtctcttcagtcccagttgacagcttctgaacgtttccaagagaatagttcggatcattcagaaaccaggttgttgcaagaggtcttctttcaggcaatcctgcttgctgtgtgcttaatcacttctgcatgtgcaagatggtttatgggagaaatattagccagtgtcttcacatgctcattgatgataactgtagcttatgtgaaatcattgtttctcagccttgccagctatttcaaaaccactgcctgtgctcggtttgtcaaaatttgacaaccatttaggaatgccttcgatgaatgtcctccatctgaatatctggaaattgtccaacttgcagtctacttggaatcaagtgttttattggaagggagtaagcgagtaatggagaaaaagccattttagtttgactatgtgattttaaaatgatctcagtttttccatcaaaattataatatgctcatgaaaataatattaatttgccttccctttgcaaacaccggcagttgaaaggaaaaggacggggaatgtgatggaaaagagaccgcctggaataaatgtccccctatgattctttaaggcagtggttctcgagcttgaattttcattaggaaattctgtgaggagcttgtaaccagatttctgggtctgccacatgcacctatctcttgctgaattgctttaatagaataatgagagcaagtttgtctaactaataccaacctgacaacttgaataacaataaatgcaatttgtacataaaatataatgctgcaaaagtttgtcattcacctcagtggagtgacttgatattaggtggtaaccgtagatgatggttaatatgaaaatggacaggaaagaagcattttctgaaagttatattcttttgaaccacgttctaaaccaagtttttaatcttcttggggctcgtaattacctttcactttaatgtcacttaaagatataacacagaaaaatgccttgagggcaaaatataggcaaaacaccaatgcgctttcaaatgcatgaaaatggtgcagttgtacccttgagccttgactcaagggctgtagatgttccctttccaccccccacacttggtgcgtgttcacaaagcaaatatggcctgtaattcaaatttgttctatgtgatactctctgagtaaaaactcatacatgcagaaaattgtctttgctcgaaatgataatgccaaaatataactttatatataatttgcatttagtacatttttggttaaaaaataaactaataaataagtgaagtcatcagc

SEQ ID NO: 392 - protein, 276 aa, Homo sapiens
MYRISQLMSTPVASSSRLEREYAGELSPTCIFPSFTCDSLDGYHSFECGSIDPLTGSHYTCRRSPRLLTNGYYIWTEDSFLCDKDGNITLNPSQTSVMYKENLVSTSKSWLHGSIFGDINSSPSEDNWLKGTRRLDTDHCNGNADDLDCSSLTDDWESGKMNAESVITSSSSHIISQPPGGNSHSLSLQSQLTASERFQENSSDHSETRLLQEVFFQAILLAVCLITSACARWFMGEILASVFTCSLMITVAYVKSLFLSLASYFKTTACARFVKI

SEQ ID NO: 393 - DNA, 1508 bp, Homo sapiens
cgctaagcgtcccagccgcatccctcccgcagcgacggcggcccgggacccgcgggctgtgaaccatgaacacccgcaatagagtggtgaactccgggctcggcgcctcccctgcctcccgcccgacccgggatccccaggacccttctgggcggcaaggggagctgagccccgtggaagaccagagagagggtttggaggcagcccctaagggcccttcgcgggagagcgtcgtgcacgcgggccagaggcgcacaagtgcatacaccttgatagcaccaaatataaaccggagaaatgagatacaaagaattgcggagcaggagctggccaacctggagaagtggaaggagcagaacagagctaaaccggttcacctggtgcccagacggctaggtggaagccagtcagaaactgaagtcagacagaaacaacaactccagctgatgcaatctaaatacaagcaaaagctaaaaagagaagaatctgtaagaatcaagaaggaagctgaagaagctgaactccaaaaaatgaaggcaattcagagagagaagagcaataaactggaggagaaaaaaagacttcaagaaaaccttagaagagaagcatttagagagcatcagcaatacaaaaccgctgagttcttgagcaaactgaacacagaatcgccagacagaagtgcctgtcaaagtgctgtttgtggcccacaatcctcaacatgggccagaagctgggcttacagagattctctaaaggcagaagaaaacagaaaattgcaaaagatgaaggatgaacaacatcaaaagagtgaattactggaactgaaacggcagcagcaagagcaagaaagagccaaaatccaccagactgaacacaggagggtaaataatgcttttctggaccgactccaaggcaaaagtcaaccaggtggcctcgagcaatctggaggctgttggaatatgaatagcggtaacagctggggtatatgagaaaatattgactcctatctggccttcatcaactgacctcgaaaagcctcatgagatgctttttcttaatgtgattttgttcagcctcactgtttttaccttaatttcaactgcccacacacttgaccgtgcagtcaggagtgactggcttctccttgtcctcatttatgcatgtttggaggagctgattcctgaactcatatttaaactctactgccagggaaatgctacattatttttctaattggaagtataattagagtgatgttggtagggtagaaaaagagggagtcacttgatgctttcaggttaatcagagctatgggtgctacaggcttgtctttctaagtgacatattcttatctaattctcagatcaggttttgaaagctttgggggtctttttagattttaatccctactttctttatggtacaaatatgtacaaaagaaaaaggtcttatattcttttacacaaatttataaataaattttgaactccttctgtaaaaaaaaaaaa

SEQ ID NO: 394 - protein, 307 aa, Homo sapiens
MNTRNRVVNSGLGASPASRPTRDPQDPSGRQGELSPVEDQREGLEAAPKGPSRESVVHAGQRRTSAYTLIAPNINRRNEIQRIAEQELANLEKWKEQNRAKPVHLVPRRLGGSQSETEVRQKQQLQLMQSKYKQKLKREESVRIKKEAEEAELQKMKAIQREKSNKLEEKKRLQENLRREAFREHQQYKTAEFLSKLNTESPDRSACQSAVCGPQSSTWARSWAYRDSLKAEENRKLQKMKDEQHQKSELLELKRQQQEQERAKIHQTEHRRVNNAFLDRLQGKSQPGGLEQSGGCWNMNSGNSWGI

SEQ ID NO: 395 - DNA, 3869 bp, Homo sapiens
gagccggtggcgcaggtgtcggggtcctcgagcgcccagcctgggagcatgattgtggacaagctgctggacgacagccgcggcggagaggggctgcgggacgcggcgggcggctgcggcctcatgaccagcccgctcaacctgagctacttctacggcgcgtcgccgcccgccgccgccccgggcgcctgcgacgccagctgctcggtcttgggcccctcggcgcccggctcgcccggctccgactcctccgacttctcctctgcctcgtcggtgtcctcctgcggcgccgtggagtcccggtcgagaggcggcgcccgcgccgagcgccagccagttgagccccatatgggggttggcaggcagcagagaggcccctttcaaggtgttcgggtaaagaactcagtgaaggaactcctgttgcacatccgaagtcataaacagaaggcttctggccaagctgtggatgattttaagacacaaggtgtgaacatagaacagttcagagaattgaagaacacagtatcatacagtgggaaaaggaaagggcccgattcgttgtctgatggacctgcttgcaaaaggccagctctgttgcattcccaatttttgacaccacctcaaacaccaacgcccggggagagcatggaagatgttcatctcaatgaacccaaacaggagagcagtgctgatctgcttcagaacattatcaacattaagaatgaatgcagccccgtttccctgaacacagttcaagttagctggctgaaccccgtggtggtccctcagagctcccccgcagagcagtgtcaggacttccatggagggcaggtcttttctccacctcagaaatgccaaccattccaagtcaggggctcccaacaaatgatagaccaggcttccctgtaccagtattctccacagaaccagcatgtagagcagcagccacactacacccacaaaccaactctggaatacagtccttttcccatacctccccagtcccccgcttatgaaccaaacctctttgatggtccagaatcacagttttgcccaaaccaaagcttagtttcccttcttggtgatcaaagggaatctgagaatattgctaatcccatgcagacttcctccagtgttcagcagcaaaatgatgctcacttgcacagcttcagcatgatgcccagcagcgcctgtgaggccatggtggggcacgagatggcctctgactcttcaaacacttcactgccattctcaaacatgggaaatccaatgaacaccacacagttagggaaatcactttttcagtggcaggtggagcaggaagaaagcaaattggcaaatatttcccaagaccagtttctttcaaaggatgcagatggtgacacgttccttcatattgctgttgcccaagggagaagggcactttcctatgttcttgcaagaaagatgaatgcacttcacatgctggatattaaagagcacaatggacagagtgcctttcaggtggcagtggctgccaatcagcatctcattgtgcaggatctggtgaacatcggggcacaggtgaacaccacagactgctggggaagaacacctctgcatgtgtgtgctgagaagggccactcccaggtgcttcaggcgattcagaagggagcagtgggaagtaatcagtttgtggatcttgaggcaactaactatgatggcctgactccccttcactgtgcagtcatagcccacaatgctgtggtccatgaactccagagaaatcaacagcctcattcacctgaagttcaggagcttttactgaagaataagagtctggttgataccattaagtgcctaattcaaatgggagcagcggtggaagcgaaggatcgcaaaagtggccgcacagccctgcatttggcagctgaagaagcaaatctggaactcattcgcctctttttggagctgcccagttgcctgtcttttgtgaatgcaaaggcttacaatggcaacactgccctccatgttgctgccagcttgcagtatcggttgacacaattagatgctgtccgcctgttgatgaggaagggagcagacccaagtactcggaacttggagaacgaacagccagtgcatttggttcccgatggccctgtgggagaacagatccgacgtatcctgaagggaaagtccattcagcagagagctccaccgtattagctccattagcttggagcctggctagcaacactcactgtcagttaggcagtcctgatgtatctgtacatagaccatttgccttatattggcaaatgtaagttgtttctatgaaacaaacatatttagttcactattatatagtgggttatattaaaagaaaagaagaaaaatatctaatttctcttggcagatttgcatatttcatacccaggtatctgggatctagacatctgaatttgatctcaatggtaacattgccttcaattaacagtagcttttgagtaggaaaggactttgatttgtggcacaaaacattattaatatagctattgacagtttcaaagcaggtaaattgtaaatgtttctttaagaaaaagcatgtgaaaggaaaaaggtaaatacagcattgaggcttcatttggccttagtccctgggagttactggcgttggacaggcttcagtcattggactagatgaaaggtgtccatggttagaatttgatctttgcaaactgtatataattgttatttttgtccttaaaaatattgtacatacttggttgttaacatggtcatatttgaaatgtataagtccataaaatagaaaagaacaagtgaattgttgctatttaaaaaaattttacaattcttactaaggagtttttattgtgtaatcactaagtctttgtagataaagcagatggggagttacggagttgttcctttactggctgaaagatatattcgaattgtaaagatgctttttctcatgcattgaaattatacattatttgtagggaattgcatgcttttttttttttttctcccgagacagggtcttgctctggcgcccaggctggagtacagtggcatgatcttggctcacttcagccttgacttgggctcaagtgatcctcctacctgagccttctgagtaactgggactacaggtgtgcactcctcgcctggctaattttttattttttgtacaggcaggatcttgccaccttgcccaggctggtcttgaactcctgagctcatgccatctgcctgccttagtctcccaaaatgctgggattacaggagtgagccaccatgcccggctggcagttgcatggaagagaacacctctttatggcttaccctctagaatttctaatttatgtgttctgttgaaatttttgtttttttacctttattgaaacaacaaaaagtcagtattgaaacatatcttcctgttttctgttgtcaaatgatgataatgtgccatgatgttttatatatatcattcagaaaaagttttattttttaataacattctattaacattattttgcttgccgctggcatgcctgaggaatgtatttggctttgattacacactaagtttttgtaataaatttgactcattaaaaaccttttttttttaaaaaaaaaaaaaagaaaatctcattagtgaacttatctttgcagctgagtacttaaattctttttaaaaagataccctttggattgatcacattgtttgacccagtatgtcttgtagacacgttagttataatcaccttgtatctctaaatatggtgtgatatgaaccagtccattcacattggaaaaactgatggttttaaataaactaattcactaataaaaaaaaaaaaaaa

SEQ ID NO: 396 - protein, 718 aa, Homo sapiens
MIVDKLLDDSRGGEGLRDAAGGCGLMTSPLNLSYFYGASPPAAAPGACDASCSVLGPSAPGSPGSDSSDFSSASSVSSCGAVESRSRGGARAERQPVEPHMGVGRQQRGPFQGVRVKNSVKELLLHIRSHKQKASGQAVDDFKTQGVNIEQFRELKNTVSYSGKRKGPDSLSDGPACKRPALLHSQFLTPPQTPTPGESMEDVHLNEPKQESSADLLQNIINIKNECSPVSLNTVQVSWLNPVVVPQSSPAEQCQDFHGGQVFSPPQKCQPFQVRGSQQMIDQASLYQYSPQNQHVEQQPHYTHKPTLEYSPFPIPPQSPAYEPNLFDGPESQFCPNQSLVSLLGDQRESENIANPMQTSSSVQQQNDAHLHSFSMMPSSACEAMVGHEMASDSSNTSLPFSNMGNPMNTTQLGKSLFQWQVEQEESKLANISQDQFLSKDADGDTFLHIAVAQGRRALSYVLARKMNALHMLDIKEHNGQSAFQVAVAANQHLIVQDLVNIGAQVNTTDCWGRTPLHVCAEKGHSQVLQAIQKGAVGSNQFVDLEATNYDGLTPLHCAVIAHNAVVHELQRNQQPHSPEVQELLLKNKSLVDTIKCLIQMGAAVEAKDRKSGRTALHLAAEEANLELIRLFLELPSCLSFVNAKAYNGNTALHVAASLQYRLTQLDAVRLLMRKGADPSTRNLENEQPVHLVPDGPVGEQIRRILKGKSIQQRAPPY

SEQ ID NO: 397 - DNA, 468 bp, Homo sapiens
tttttttctagaaaaaacacagcttctgtaatcttttctctttctctttcctggaaattagaacaaattttttgaaggaagaaatattgtcaacattataaccttgagtgaagcattattactttagtaaatatctcgctaagatactgaacatcaaaattaaaaatcaaacaacttctaaatgtatttatttgcatttttatgctgtgtacttttgaatatagtgattttattatttttagtaaaatttcatgaactgctgtgtactttggtttcacacactcaacaccataccaataatgaaattattagtaatttcaagttactaattgattggctgtcatgtgctataaatgataatgccatctgtgaaccagcaaggcatagacagaattgtttggaaaaaagcctgattagtaccagttgcattaattctaactcccctaatttaggaccttttttttctta

SEQ ID NO: 398 - DNA, 3817 bp, Homo sapiens
tgaattcgtgagagacttgagggaggcgctgcgactgacaagcggctctgcccgggaccttctcgctttcatctagcgctgcactcaatggaggggcgggcaccgcagtgcttaatgctgtcttaactagtgtaggaaaacggctcaacccaccgctgccgaaatgaagtataagaatcttatggcaagggccttatatgacaatgtcccagagtgtgccgaggaactggcctttcgcaagggagacatcctgaccgtcatagagcagaacacagggggactggaaggatggtggctgtgctcgttacacggtcggcaaggcattgtcccaggcaaccgggtgaagcttctgattggtcccatgcaggagactgcctccagtcacgagcagcctgcctctggactgatgcagcagacctttggccaacagaagctctatcaagtgccaaacccacaggctgctccccgagacaccatctaccaagtgccaccttcctaccaaaatcagggaatttaccaagtccccactggccacggcacccaagaacaagaggtatatcaggtgccaccatcagtgcagagaagcattgggggaaccagtgggccccacgtgggtaaaaaggtgataacccccgtgaggacaggccatggctacgtatacgagtacccatccagataccaaaaggatgtctatgatatccctccttctcataccactcaaggggtatacgacatccctccctcatcagcaaaaggccctgtgttttcagttccagtgggagagataaaacctcaaggggtgtatgacatcccgcctacaaaaggggtatatgccattccgccctctgcttgccgggatgaagcagggcttagggaaaaagactatgacttcccccctcccatgagacaagctggaaggccggacctcagaccggagggggtttatgacattcctccaacctgcaccaagccagcagggaaggaccttcatgtaaaatacaactgtgacattccaggagctgcagaaccggtggctcgaaggcaccagagcctgtccccgaatcacccacccccgcaactcggacagtcagtgggctctcagaacgacgcatatgatgtcccccgaggcgttcagtttcttgagccaccagcagaaaccagtgagaaagcaaacccccaggaaagggatggtgtttatgatgtccctctgcataacccgccagatgctaaaggctctcgggacttggtggatgggatcaaccgattgtctttctccagtacaggcagcacccggagtaacatgtccacgtcttccacctcctccaaggagtcctcactgtcagcctccccagctcaggacaaaaggctcttcctggatccagacacagctattgagagacttcagcggctccagcaggcccttgagatgggtgtctccagcctaatggcactggtcactaccgactggcggtgttacggatatatggaaagacacatcaatgaaatacgcacagcagtggacaaggtggagctgttcctgaaggagtacctccactttgtcaagggagctgttgcaaatgctgcctgcctcccggaactcatcctccacaacaagatgaagcgggagctgcaacgagtcgaagactcccaccagatcctgagtcaaaccagccatgacttaaatgagtgcagctggtccctgaatatcttggccatcaacaagccccagaacaagtgtgacgatctggaccggtttgtgatggtggcaaagacggtgcccgatgacgccaagcagctcaccacaaccatcaacaccaacgcagaggccctcttcagacccggccctggcagcttgcatctgaagaatgggccggagagcatcatgaactcaacggagtacccacacggtggctcccagggacagctgctgcatcctggtgaccacaaggcccaggcccacaacaaggcactgcccccaggcctgagcaaggagcaggcccctgactgtagcagcagtgatggttctgagaggagctggatggatgactacgattacgtccacctacagggtaaggaggagtttgagaggcaacagaaagagctattggaaaaagagaatatcatgaaacagaacaagatgcagctggaacatcatcagctgagccagttccagctgttggaacaagagattacaaagcccgtggagaatgacatctcgaagtggaagccctctcagagcctacccaccacaaacagtggcgtgagtgctcaggatcggcagttgctgtgcttctactatgaccaatgtgagacccatttcatttcccttctcaacgccattgacgcactcttcagttgtgtcagctcagcccagcccccgcgaatcttcgtggcacacagcaagtttgtcatcctcagtgcacacaaactggtgttcattggagacacgctgacacggcaggtgactgcccaggacattcgcaacaaagtcatgaactccagcaaccagctctgcgagcagctcaagactatagtcatggcaaccaagatggccgccctccattaccccagcaccacggccctgcaggaaatggtgcaccaagtgacagacctttctagaaatgcccagctgttcaagcgctctttgctggagatggcaacgttctgagaagaaaaaaaagaggaaggggactgcgttaacggttactaaggaaaactggaaatactgtctggtttttgtaaatgttatctatttttgtagataattttatataaaaatgaaatattttaacattttatgggtcagacaactttcagaaattcagggagctggagagggaaatctttttttcccccctgagtgttcttatgtatacacagaagtatctgagacataaactgtacagaaaacttgtccacgtccttttgtatgcccatgtattcatgtttttgtttgtagatgtttgtctgatgcatttcattaaaaaaaaaaccatgaattacgaagcaccttagtaagcaccttctaatgctgcattttttttgttgttgttaaaaacatccagctggttataatattgttctccacgtccttgtgatgattctgagcctggcactgggaatctgggaagcatagtttatttgcaagtgttcaccttccaaatcatgaggcatagcatgacttattcttgttttgaaaactcttttcaaaactgaccatcttaaacacatgatggccaagtgccacaaagccctcttgcggagacatttacgaatatatatgtggatccaagtctcgatagttaggcgttggagggaagagagaccagagagtttagaggccaggaccacagttaggattgggttgtttcaatactgagagacagctacaataaaaggagagcaattgcctccctggggctgttcaatcttctgcatttgtgagtggttcagtcatgaggttttccaaaagatgtttttagagttgtaaaaaccatatttgcagcaaagatttacaaaggcgtatcagactatgattgttcaccaaaataggggaatggtttgatccgccagttgcaagtagaggcctttctgactcttaatattcactttggtgctactacccccattacctgaggaactggccaggtccttgatcatggaactatagagctaccagacatatcctgctctctaagggaatttattgctatcttgcaccttctttaaaactcaaaaaacatatgcagacctgacactcaagagtggctagctacacagagtccatctaatttttgcaacttccccccccgaattc

SEQ ID NO: 399 - protein, 834 aa, Homo sapiens
MKYKNLMARALYDNVPECAEELAFRKGDILTVIEQNTGGLEGWWLCSLHGRQGIVPGNRVKLLIGPMQETASSHEQPASGLMQQTFGQQKLYQVPNPQAAPRDTIYQVPPSYQNQGIYQVPTGHGTQEQEVYQVPPSVQRSIGGTSGPHVGKKVITPVRTGHGYVYEYPSRYQKDVYDIPPSHTTQGVYDIPPSSAKGPVFSVPVGEIKPQGVYDIPPTKGVYAIPPSACRDEAGLREKDYDFPPPMRQAGRPDLRPEGVYDIPPTCTKPAGKDLHVKYNCDIPGAAEPVARRHQSLSPNHPPPQLGQSVGSQNDAYDVPRGVQFLEPPAETSEKANPQERDGVYDVPLHNPPDAKGSRDLVDGINRLSFSSTGSTRSNMSTSSTSSKESSLSASPAQDKRLFLDPDTAIERLQRLQQALEMGVSSLMALVTTDWRCYGYMERHINEIRTAVDKVELFLKEYLHFVKGAVANAACLPELILHNKMKRELQRVEDSHQILSQTSHDLNECSWSLNILAINKPQNKCDDLDRFVMVAKTVPDDAKQLTTTINTNAEALFRPGPGSLHLKNGPESIMNSTEYPHGGSQGQLLHPGDHKAQAHNKALPPGLSKEQAPDCSSSDGSERSWMDDYDYVHLQGKEEFERQQKELLEKENIMKQNKMQLEHHQLSQFQLLEQEITKPVENDISKWKPSQSLPTTNSGVSAQDRQLLCFYYDQCETHFISLLNAIDALFSCVSSAQPPRIFVAHSKFVILSAHKLVFIGDTLTRQVTAQDIRNKVMNSSNQLCEQLKTIVMATKMAALHYPSTTALQEMVHQVTDLSRNAQLFKRSLLEMATF

SEQ ID NO: 400 - DNA, 622 bp, Homo sapiens
  Unsure 37: Unknown base
ggcacgaggtgattttcctactccactgttactgganccaccaaggcaggaactgtgtctctttaccactacagttcctgtatcttttaggtgcgtagtatttcttggtgagtcagtcagtctccagactcagtcatttttctctacattacacattctttcacattcttctcccaccagtcttcctagacttgtttcattccttcccatcttgtctctatgtatctcttcccaccattcattttccagatagcatctagactgttgtgttaaaaagcaaaactcctttcacaccacattccattaaatgccttcccactggcctttgaacaccaaaccaggcctttaaggctatgtcatctcctaccattgatctcagacctagctgcagttgcacaatacaacccctggctcaagtcttctgcacacattgttccctcacaggcaggaaccctatggtgactgatcaataattaaaacttgccttgggccaggcacagtggcttatacctataatcctagcactttgggaggccaaggtggatcagttgagcccaggagttacagaccagtctgggcatcatagagagaccttgcctctactaaaaaaaaaaaaaaaaaa

SEQ ID NO: 401 - DNA, 832 bp, Homo sapiens
  Unsure 779: Unknown base
ctcgaaattaaccctcactaaagggaacaaaagctggagctccaccgcggtggcggccgctctagaactagtggatcccccgggctgcaggaattcggcacgagggcaaaatcccaatatataattctatacctagtaaagattgtaaataactaaaacaaaatgataagagctgtgaactgaaattgtattgcttacagaaatcatgaactgaattttcttctctttttaaagtgagcataaagacttaagtgtattgttaccagagatatatttagatagtatacatcattttggcaggtaatcttctagaacctttcatgtactgtttccatcaagggagggaaagaaatagaaaatataattttatctatattttccttaaaatatatcaatctgtgcacactctttcagttttttaattactcatgtaatatatgactacattttgcttgtgtgctttttgaaaaccatcttcagtcccaatatcctctgtagaagtaatagttttaactctcctagatcttcttttagagtgtttttatgagtgtttaatgtaggaatgtgtatatattatctacagccacaggaaatgtatagttacgatttttacatacgtgtatgtatattattgtacaacttgctatttctacttgggagttttttattttggtacattcacatttacctaatctcttgtgcactgtccaacagtactttgcctataatagacacttaaggaagttttccttctttttattcctttataattaccaacnatgctgaaaggaacatcatcctacatgagccctttttgtacatataaggctct

SEQ ID NO: 402 - DNA, 4130 bp, Homo sapiens
ggcacgaggctgcgcctcgggggtcggcgtccaggctcggagcgcggcacggagacggcggcagcgctggactaggtggcaggccctgcatcatggaaactctttctaatgcaagtggtacttttgccatacgccttttaaagatactgtgtcaagataacccttcgcacaacgtgttctgttctcctgtgagcatctcctctgccctggccatggttctcctaggggcaaagggaaacaccgcaacccagatggcccaggcactgtctttaaacacagaggaagacattcatcgggctttccagtcgcttctcactgaagtgaacaaggctggcacacagtacctgctgagaacggccaacaggctctttggagagaaaacttgtcagttcctctcaacgtttaaggaatcctgtcttcaattctaccatgctgagctgaaggagctttcctttatcagagctgcagaagagtccaggaaacacatcaacacctgggtctcaaaaaagaccgaaggtaaaattgaagagttgttgccgggtagctcaattgatgcagaaaccaggctggttcttgtcaatgccatctacttcaaaggaaagtggaatgaaccgtttgacgaaacatacacaagggaaatgccctttaaaataaaccaggaggagcaaaggccagtgcagatgatgtatcaggaggccacgtttaagctcgcccacgtgggcgaggtgcgcgcgcagctgctggagctgccctacgccaggaaggagctgagcctgctggtgctgctgcctgacgacggcgtggagctcagcacggtggaaaaaagtctcacttttgagaaactcacagcctggaccaagccagactgtatgaagagtactgaggttgaagttctccttccaaaatttaaactacaagaggattatgacatggaatctgtgcttcggcatttgggaattgttgatgccttccaacagggcaaggctgacttgtcggcaatgtcagcggagagagacctgtgtctgtccaagttcgtgcacaagagttttgtggaggtgaatgaagaaggcaccgaggcagcggcagcgtcgagctgctttgtagttgcagagtgctgcatggaatctggccccaggttctgtgctgaccaccctttccttttcttcatcaggcacaacagagccaacagcattctgttctgtggcaggttctcatcgccataaagggtgcacttaccgtgcactcggccatttccctcttcctgtgtccccagatccccactacagctccaagaggatgggcctagaaagccaagtgcaaagatgagggcagattccttacctgtctgccctcatgatttgccagcatgaattcatgatgctccacactcgcttatgctacttaatcagaatcttgagaaaatagaccataatgattccctgttgtattaaaattgcagtccaaatcccataggatggcaagcaaagttcttctagaattccacatgcaattcactctggcgaccctgtgctttcctgacactgcgaatacattccttaacccgctgcctcagtggtaataaatggtgctagatattgctactattttatagatttcctggtgcttagccttataaaaaaggttgtaaaatgtacatttatattttatcttttttttttttttttttctgagacgcagtctggctctctgtcgcccaggctggagtgcagtggctcgatctctgctcactgcaagctccgcctcccgggttcacgccattctcctgcctcagcctcccgagtagctgggactacaggcgcccgccaccacgcccggctaattttttgtatttttagtagagacggggtttcaccgtgttagccaggatggtgtcgatctcctgacctcgtgatccacccgcctcggcctcccaaagtgctgggattacaggcttgagccaccgcgcccggctatattttatcttttatctttttctttgacatttaccaatcaccaagcatgcaccaaacactgctttaggcactggggacacaaaggggacagagccatcctcctttgacacctggtcttcagttctgtgcccaacgtatatagttttgacaatgaccaggttggactgtttaatgtctttcaacttaccacgtaatcctcttgtagggatcacatctttctttatgatattgtatttctctacctctaacagtaaaaattccattcaacccttaaagctcacttcaaattcttctttgagaagtttttcctttctccgcaaccagatgtacatatttgaactctctttgtacttggagggcacttctttcgtggtagttcttttatttttattaatctctgtatccttagatagtcctccaacaaccaaaggttgggactctgtcttacatatctgggtgcccctcatagtgcagtaataagtaagttgattatatacgagctatgtaacttatattttttaatggttggatatcactgagtttttttttttaagaatttttttattgaggtaaacttcacataacataaaattaactattttaaagtgagaagttcagtgccacttagtattgttaacaatgttgcataaccaccacctttatttaaagttccaaaaaaaatgttctcctctaaaaggaaaccccatcccattaagcagatactctccattccttccttcctccagcccccagcaaccaccaatctgctttctgtctctatggttttatctattcttgctattttatataaatcgaattgtatgagaccttttgtgtctggcttctttcacttagtacaagtttttgagatttatttacatagtagcatgtatcaacacttcatttttatggccaaataaaattgtattatgtgtttatagcacaatttatttatccactcattcattgatggactttgggttgtttctgacttttggctattgggaatagtgctgctatgaatgtttgtgtacctgtatttgtttgaatgcctattttgcattctcttgggtatatatctaggagtggaactgctgggtcatatgttaattctatgtttagctttttgaggaacagacaaactgttttccacagcagttgaaccattccacattcccaccagcaatgtatgagaattccaatttctgtccacttcctcaccaacacttattattttccttttcctttttttaaaaaaaataagttatggccatcttagtgggtgtgaagtggtatctcattgtgttttttatttgcatttcctatgtaatgagctagaaactaaagtacaaactagatgggacatccagtccctttgatagataatgctgagtaaaaaatgagatgaaagacatttgtttgtttttagaacatgagtgacagtttgttaaaaagctttagaggaggaatgaaaacaaagtgaagtacacttagaaaagggccaagtggacatcttggatgtcaagtgcctagttcagtatcttttttttttttttttttttttttgagacagtgcctcactctgtcacccaggctggagtgtagtggcatgatctgggctcactgcaacctcctcctcctggattcaagcaattctcttgcttcagcctcccaagtagctgagactacaagcacccaccaccacacccggctaattttgtatttttcagtagagacggggtttcgccacattggccgtgttggtcttgaactcctggcctcaagcaatccgcctacctcagcctcccaaagtgctaggattacaggcataagccactgagcccagccctagttcagtatcttttatgtaaattataaacatctgcaacattatgtatcatatgcagatacttattgcatttcttttattagtggtgaaagtgttctatgcatttattggctcttgaatttcctcatctatgaattgtcattcacacacctacttttctgcttcgtttttacatatgtctttgcctattaaagatattatccctctgttttatattttctctcattcttgtattgccttttaaattttgttatgatgtttcattaataaacagtgttttgttttcctctataaaaaaaaaaaaaaaa

SEQ ID NO: 403 - protein, 376 aa, Homo sapiens
METLSNASGTFAIRLLKILCQDNPSHNVFCSPVSISSALAMVLLGAKGNTATQMAQALSLNTEEDIHRAFQSLLTEVNKAGTQYLLRTANRLFGEKTCQFLSTFKESCLQFYHAELKELSFIRAAEESRKHINTWVSKKTEGKIEELLPGSSIDAETRLVLVNAIYFKGKWNEPFDETYTREMPFKINQEEQRPVQMMYQEATFKLAHVGEVRAQLLELPYARKELSLLVLLPDDGVELSTVEKSLTFEKLTAWTKPDCMKSTEVEVLLPKFKLQEDYDMESVLRHLGIVDAFQQGKADLSAMSAERDLCLSKFVHKSFVEVNEEGTEAAAASSCFVVAECCMESGPRFCADHPFLFFIRHNRANSILFCGRFSSP

SEQ ID NO: 404 - DNA, 2286 bp, Homo sapiens
attttgactggcaaaatgtggcagatttcagggatgcaggtggatccttaactgaggtcaaggtggaagaggaagaaagggatccgcagagtcctgaatttgaaattgaggaggaggaagaaatgttgtcatccgtcataccagattccaggagagaaaatgaacttcccgatttcccccacattgatgagttttttacccttaactcaacaccatctagatctgcatatgatgagcctcatttgctcgtaaatattgagaaacagaaactagagttggaaaaacgacgactggatatcgaggccgaaaggctgcaggtagaaaaggaacgcctacaaatcgagaaagagaggctgcggcatttagacatggaacatgagcggcttcagctagagaaggagcggctgcagattgaaagagaaaagttgaggttacagatagtcaattcagagaaaccgtccttggaaaatgaacttggtcaaggagaaaaatccatgcttcaaccacaggacatagaaacagagaagttaaaacttgagcgagaacgcttgcaactggaaaaggataggctgcagtttttgaagtttgaatctgagaagctgcagattgaaaaggaacgcttacaggtagagaaagacagacttcgaattcagaaagaaggacacttgcagtgatttttccaggcttccatttagcaaatgtttgaaaactctagatttttctcatatcaggtgatataatgatggttgctggattagctgtggtttcttgtctaatgtcagtgttcagtaggaaaaagttatatgtggataactgtatgcctaagtagtatataaaagctgtgccctagcgtaaacagtatagcagaaacttactgtgctggactctttaccttataatattacatagagtcttgtattgtctgtgtacccagagtttacaattatgtccatataaaattctagcccagaagttctcatctggggtagattttggccttcagaagaccaatttggtgatgtctggagacatgttgggttgtcaaaactggggtggggaaaaggttgctactgtgcaatgcatacctcctcaacacccccccacactcagtaaagaattttccaacccaaaatatcattagtcctgaggttgagaaaccctgtcctagcctaactgtatacctctatagctatgttttatagttttagaatattaaaacctcagatatttatgtgggtaggtacttaaatggccaaaaactttaactatgaaatgttactgtgtagtatattgaatataggaagtgatgaagattataggtattttattcccatgtttccatctataaatagccttctcagattcagaaaacaatacagagaacatcagaaattttctaaaatgggtcactttgaaaagaattctttttctcactattaatgctttagaagcaagacgcaattttaaagctttagttccttttctttcagtcattgtcttagtttgggtacaaaaatgtcatttcagtaatgtactgaaatcttataagtgaatagttgaagctagtaaaaatgataccagtataaaaatggtacttgtagtccatgagcttgaacccaatgactgattgtttgacttttaaaataagtaatagcagccatttgggagtagggggtaggtggggaagatgtactccgtatcaaataataatgatgttgaaataatgatagtaggtatgtattatggattggagaagcacttattacactatctaacctaatatgtagaacaattcttgagagttgtatctgtcgttatttctgaatgtgaagctcagagaagtgacacagagtaaatggctgatcttctatattgtagtatattttgtccttccctcttccctgaggaacaaagcacgtatctttagtctctttgatatttattctgagaccaagggcttgcttgacctgatgattttccttcagctctctgaaggtgctttttccacaatccaagtgattctgatacacactaaagttgagaatcactgcactagatcactttgtgttttctgattttcaaggttgatacgtagctttaatacagctcctctgttgacagttattactttaattttgcatttgttccttgtaagaatggctggaaactgtgtgttgacatttgaggatgggtatgcaaggaaaaaatatacttctgtttacttactctgactttgaaatagtgttatttttctatatctgaaataaatgcttctaccatagaaat

SEQ ID NO: 405 - protein, 183 aa, Homo sapiens [sequence omitted]

SEQ ID NO: 406 - DNA, 855 bp, Homo sapiens
  Unsure 20,42,49,791,822,837: Unknown base
gatcgaatttaatacgactnctatagggaatttggccctcgngccaagnaattcggcacgaggacatccatggcatggctgacagcttccgtgaccaacatggtacagcccttcctaccttctcatttattctactttgtaacttaacagcattatgccaacgataatttaactagaaaaagttcctgagagaataacaaatctgtgattttattatgtcttttatcatgttttgcagctttcagattcagatgtcaataatttgtttctatgatcagagtatataaatcccatgcaaacatatctcagcataactgattttgtttctaaataattaaacaggataaaatgttatttgttgtaagctgttgacatttgtaaggaaattttgtttcactgaatatgtttagagatgccgccagaacattaaccattgtttcatttttatgtaagttgaagaaaaatgaagctagatagcatgttctccatttgcagtctacaaaggggaattttattgcttaaattaaagtttcattttctggcctgtgcaagagacttttatatctaaaatatggatgtacgtttttcatattttagagttcattgtatggaaaaataccatcaaagttgaccaaaagattttgaaaatccttaccagttgtttgtcatatgttaaagtcttatgggtaattttatttattttatcttggtctcttgctggttattggcagactcagtctttctgttttcacaaagaactcatgaagaggacgataggggaaacccacgtntgcctttgaggctagggactatgttgtaagntcaccctgtgatggncaggtcatacagtcatgg

SEQ ID NO: 407 - DNA, 315 bp, Homo sapiens
ctcttacagcaaatatcactacctgacatattttactagaatgtaagctccatgaggaggggattttgttttgtttaccatggtgtttttagtattcagaacatgcctgcttacatagtagttgctaaaaaatttttttgttaaatgaataagttgaatcatgttgtttccagtgtagacagaataggtatatgtggttgaaaaatgaacagcacaaagttagctccccaaaaatggcaaagtgaaataaagaaacatttctgaagaacattgttgaactgtaatcccagcactttgggaggctggggcagttgg

SEQ ID NO: 408 - DNA, 1291 bp, Homo sapiens
aaaaaaacaaaaaacaaaacaaaaaaaaaaccttccaaaagaagtttgagataattttatgtttagaaaaattagaaattggattgagtaaaatttacatattttacacaagaggactaacatctttataatatttaacctttcagtaaatttatgttttatgtttctcagcctatcttttctagtataggtgatttttttagtgtggttactattgtaaatgagatcctactactttaaaaaatgaaaattaaatctatcgcttttatgactttaaaacattagacttatgtaagtgtaaacattatttaaaaacataatgtagaaaattaaagtcccccataattaaaatccctttcccccagaaaaagtcaacagcatattcatcagttttttcctaaagtatgttttagcactttgaccatatgagacaacccttctgctgttagcatttttctctttgcaatagatcttcctatgtcagtacacatcaatctacctcattcttacctctgcataagagagtagtgtgtagttgtataatagtttaacttggcgattggttattgattttgtaactagccagttactgaattattctaaaggttttgctgttgttaatttctttcgcctttttcagttgggtaatagttctgggtaggttgataattttattcccatatttgtaatcttatttcactttctcaactcatcacattgactggtacttttagaacaatgttaaaaaacatttacataattgtgctgatattgtacattatttgatatatatatattttttttacttagaagagtgtttctccaaaactataaatttgactcttagtgtaaaataatcttaatatttgaattatacattcaggttatgccctctatttctagtttgatgaaaatattattagtaatggatgttggggttttattaaatggcttttttccacatctgtcaagatgatcaactggcttttctctattatgactttagatgaatcgttttaatagatttgctaatgttaagacatctctgcatttctacaagaatctgatgtagtcatagtatactattcttttaatatacatctcctttcaatgttaacagtggttatttatgattggttggtccatagtagatttttattttgtgtttcttatctgtactttctgatttttctacaaagattgtgtattacttgtataataaaaataagagctttaaattgtgaaattcttctggatttggttttctcattttattatggaatttttcata

SEQ ID NO: 409 - DNA, 529 bp, Homo sapiens
  Unsure 475,489: Unknown base
ggcacgaggcaaagagctgcctaaagaaactggtagctggagcaaactgcagagatcaagatgaccctagtccacggaaccagcagcccaggtcagccacattcaggagcaccaccgaggcacggcagggagagcaaagttgctggccccaatcattcctccttttcagggcaggagaggcagaagctcactctttagacatgttcttgatggtcttgtgctctttcatggccttctcccaatcgctgccattgaattcctcagtgaccatactccgcacagtgccctcatccaggcagtggggggcaattccgaagcctccggggtttgatcgtggagtatagaagctctgaacgccacatctcttacagaaggtatgctgggctttgtgagtattgaacgtgtaagtcgttatgtgctcagctcccttcaggagcttgaagcgagaagcctggaacaatgaagtgtctattcntgcttcttcttgcnaatgctgcaactacagaaagacagagcaaattccagattg

SEQ ID NO: 410 - DNA, 679 bp, Homo sapiens
atttggaagattttgttatggtgtcactgtcattttgacataccctatggaatgctttgtgacaagagaggtaattgccaatgtgttttttggtgggaatctttcatcggttttccacattgttgtaacagtgatggtcatcactgtagccacgcttgtgtcattgctgattgattgcctcgggatagttctagaactcaatggtgtgctctgtgcaactcccctcatttttatcattccatcagcctgttatctgaaactgtctgaagaaccaaggacacactccgataagattatgtcttgtgtcatgcttcccattggtgctgtggtgatggtttttggattcgtcatggctattacaaatactcaagactgcacccatgggcaggaaatgttctactgctttcctgacaatttctctctcacaaatacctcagagtctcatgttcagcagacaacacaactttctactttaaatattagtatctttcaatgagttgactgctttaaaaatatgtatgttttcatagactttaaaacacataacatttacgcttgctttagtctgtatttatgttatataaaattattattttggcttttatcaagacttggcttttatgagtagtgcaatataaaagataaagaaaagaaaaattgatgttttcacctttaactg

SEQ ID NO: 411 - protein, 164 aa, Homo sapiens
FGRFCYGVTVILTYPMECFVTREVIANVFFGGNLSSVFHIVVTVMVITVATLVSLLIDCLGIVLELNGVLCATPLIFIIPSACYLKLSEEPRTHSDKIMSCVMLPIGAVVMVFGFVMAITNTQDCTHGQEMFYCFPDNFSLTNTSESHVQQTTQLSTLNISIFQ

SEQ ID NO: 412 - DNA, 602 bp, Homo sapiens
gacgcggggccggaacgcgaagagggtggtggagtcgggctacccactgattttccttcccttacttcccctgagcccttgggcccacttcccagcctaccgcttccgtccccgcccgactcttgggccagcgcctgggcccacactttcctatcccccgcagatgccggtggccgtgggtccctacggacagtcccagccaagctgcttcgaccgtgtcaaaatgggcttcgtgatgggttgcgccgtgggcatggcggccggggcgctcttcggcaccttttcctgtctcaggatcggaatgcggggtcgagagctgatgggcggcattgggaaaaccatgatgcagagtggcggcacctttggcacattcatggccattgggatgggcatccgatgctaaccatggttgccaactacatctgtcccttcccatcaatcccagcccatgtactaataaaagaaagtctttgagtaaaaaaaaaaaaaaaaaaaaaaaaaaaaaaaaaaaaaaaaaaaaaaaaaaaaaaaaaaaaaaaaaaaaaaaaaaaaaaaaaaaaaaaaaaaaaaaaaaaaaaaaaaaaaaaaaaaaaaaaaaaaaa

SEQ ID NO: 413 - protein, 79 aa, Homo sapiens
MPVAVGPYGQSQPSCFDRVKMGFVMGCAVGMAAGALFGTFSCLRIGMRGRELMGGIGKTMMQSGGTFGTFMAIGMGIRC

SEQ ID NO: 414 - DNA, 841 bp, Homo sapiens
aacatgtaagactactgttcacaatttggacattttcctttcaaacacatttttcatgaatatattataggaaagttaaaaccatctctattctaaaaggaaaatctaccattttgctcagagagaaagttactgagtttgtctatgtgattttaagtagtattgattagagtattaaagaaatggggtacttcaagtaacataacacctgatatttaaatctaagttttaaaaatgtatttcacccattgttaatgaaagtgtttctaagatgtaacccctggttagctattccgtcttcttgccttgatgggttgactggtggtgaatgtgctgttgtcattccattgacagttcgggatttgtggtggtctcagcatattagcatagatgtgagttgtaattttataggattatggaactgtaattgtggaactcctgcagggcagactctggaggctagctttttagaaaactaaaacctccagtataaacttaatttctgtcatttgccccattttcttgaaagttaagtgccagaaaagaaaaggatcgagtctctcttttctttctacaataaaacagaatatactttctccagggttggtggtgggttcctttttcctgttgaggtggattctgagattgaggaggggctggagaagacagagcatgagggaaagagactgagaacatactcaggctgccctcgcctccttttccctttcgtgctcctgtctcccatctaggaggaccagggctaccagtccttgtggggacaagtttgagtaggatcaagagacatgtactgcgccagggccgtgggttacaactgtaatcc

SEQ ID NO: 415 - protein, 74 aa, Homo sapiens
MKVFLRCNPWLAIPSSCLDGLTGGECAVVIPLTVRDLWWSQHISIDVSCNFIGLWNCNCGTPAGQTLEASFLEN

SEQ ID NO: 416 - DNA, 2618 bp, Homo sapiens
tgcagctagtgtgtcaactcagcgtttctcctctcgtccctggaagagctaaagatggctgaatttctagatgaccaggaaactcgactgtgtgacaactgcaaaaaagaaattcctgtgtttaactttaccatccatgagatccactgtcaaaggaacattggtatgtgtcctacctgtaaggaaccatttcccaaatctgacatggagactcacatggctgcagaacactgtcaggtgacctgcaaatgtaacaagaagttggagaagaggctgttaaagaagcatgaggagactgagtgccctttgcggcttgctgtctgccagcactgtgatttagaactttccattctcaaactgaaggaacatgaagattattgtggtgcccggacggaactatgtggcaactgtggtcgcaatgtccttgtgaaagatctgaagactcaccctgaagtttgtgggagagagggggaggaaaagagaaatgaggttgccatacctcctaatgcatatgatgaatcttggggtcaggatggaatctggattgcatcccaactcctcagacaaattgaggctctggacccacccatgaggctgccgcgaaggcccctgagagcctttgaatcagatgttttccacaatagaactaccaaccaaaggaacattacagcccaggtttcaattcagaataatctgtttgaagaacaagagaggcaggaaaggaatagaggccaacagccccccaaagagggtggtgaagagagtgcaaacttggacttcatgttggccctaagtctgcaaaatgaaggccaagcctccagtgtggcagagcaggacttctggagggccgtatgtgaggccgaccagtctcatggcggtcccaggtctctcagtgacataaagggtgcagctgacgagatcatgttgccttgtgaattttgtgaggagctctacccagaggaactgctgattgaccatcagacaagctgtaacccttcacgtgccttaccttcactcaatactggcagctcttcccccagaggggtggaggaacctgatgtcatcttccagaacttcttgcaacaggctgcaagtaaccagttagactctttgatgggcctgagcaattcacaccctgtggaggagagcatcattatcccatgtgaattctgtggggtacagctggaagaggaggtgctgttccatcaccaggaccagtgtgaccaacgcccagccactgcaaccaaccatgtgacagaggggattcctagactggattcccagcctcaagagacctcaccagagctgcccaggaggcgtgtcagacaccagggagacctgtcttctggttacctggatgatactaagcaggaaacagctaatgggcccacctcctgtctgcctcccagccgacccattaacaatatgacagctacctataaccagctatcgagatcaacatcaggccccagacctgggtgccagcccagctctccttgtgtgccgaagctcagcaactcagacagccaggacatccaggggcggaatcgagacagccagaatggggccatagcccctgggcacgtttcagtgattcgccctcctcaaaatctctacccagaaaacattgtgccctctttctcccctgggccttcagggagatacggagctagtggtaggagtgaaggtggcaggaattcccgggtcacccctgcagctgccaactaccgcagcagaactgcaaaggcaaagccttccaagcaacagggagctggggatgcagaagaggaagaggaggagtaatggtgtctccagagactttacatcggttcctgtcttctgtgcacagcagcacttgccgctgtgcaggcccacctctttggctctttgggtgggagagtttttccagattttagatttttctaggttatggccattttgtgtcttttgaggttgtgctgtgggggtttgggtttgagggaagggagcagggtggcggttgaggaacgcttcagccttagctgctacctttcggcagcagtgaaatacaagctgcagcctcggctgccagggctcccttttgacttattgtcgccactgccccttggtgctgtgtggtcccagtggaaggaggggaagattttggaaacctggtagccaccagtaaggtgattctctgccctgttggggcctaaatttgggggcttttgggcaacctctccgtgtactgcgtctgtccacactcgattgggccccaggtgtgtatgaggcgctctggtaaggtgctcaggccagttgcaatgtctgtcagtaacgaggcttttgatgtgttgagctggaggtgagtggaccgggggctgtgttttaagctgcttccttggcatttgcatcactgccttctgttcccgggggagcatggatcttttgtcctcactgctttctaatggggagggctgagggctccctgtccccacagcaggtatgtttgctctgccccagccccacacttgctctgaaaaccaagtgtcagagccccttccccttgtttttattttactgttataataattattaacttccttgtaatagaaataaagtttgtacttggagttcagctc

SEQ ID NO: 417 - protein, 582 aa, Homo sapiens
MAEFLDDQETRLCDNCKKEIPVFNFTIHEIHCQRNIGMCPTCKEPFPKSDMETHMAAEHCQVTCKCNKKLEKRLLKKHEETECPLRLAVCQHCDLELSILKLKEHEDYCGARTELCGNCGRNVLVKDLKTHPEVCGREGEEKRNEVAIPPNAYDESWGQDGIWIASQLLRQIEALDPPMRLPRRPLRAFESDVFHNRTTNQRNITAQVSIQNNLFEEQERQERNRGQQPPKEGGEESANLDFMLALSLQNEGQASSVAEQDFWRAVCEADQSHGGPRSLSDIKGAADEIMLPCEFCEELYPEELLIDHQTSCNPSRALPSLNTGSSSPRGVEEPDVIFQNFLQQAASNQLDSLMGLSNSHPVEESIIIPCEFCGVQLEEEVLFHHQDQCDQRPATATNHVTEGIPRLDSQPQETSPELPRRRVRHQGDLSSGYLDDTKQETANGPTSCLPPSRPINNMTATYNQLSRSTSGPRPGCQPSSPCVPKLSNSDSQDIQGRNRDSQNGAIAPGHVSVIRPPQNLYPENIVPSFSPGPSGRYGASGRSEGGRNSRVTPAAANYRSRTAKAKPSKQQGAGDAEEEEEE

SEQ ID NO: 418 - DNA, 1911 bp, Homo sapiens
ccctgcgcggctgctggaccgacgggcgcacccaggtaggggggcggctgagccgcgcagtgcggaccctcgcggggaactgcgccgccgccaccatgtctcaggaaggtgtggagctggagaagagcgtccggcgcctccgggagaagtttcatgggaaggtatcctccaagaaggcgggggctctgatgaggaaattcggcagcgaccacacgggagtggggcgctccatcgtgtacggggtaaagcaaaaagatggccaagaactaagtaacgatctggatgcccaggatccaccagaagatatgaagcaggaccgggacattcaggcagtggcgacctccctcctgccactgacagaagccaacctacgcatgtttcaacgtgcccaggacgaccttatccctgctgtggaccggcagtttgcctgctcctcctgcgaccacgtctggtggcgccgcgtgccccagcggaaggaggtatcccggtgccggaaatgccggaagcgctacgagccagtgccagctgacaagatgtggggcctggctgagttccactgcccgaagtgtcggcacaacttccggggctgggcacagatggggtccccgtccccctgctacgggtgcggcttccccgtgtatccaacacggatcctccccccgcgccgggaccgggacccggatcgccgcagcacccacactcactcctgctcagctgccgactgctacaaccggcgagagccccacgtgcctgggacatcctgtgctcaccccaagagccggaagcagaaccacctgcccaaagtgctccaccccagcaaccctcacattagcagtggccccactgtggccacctgcttgagccagggtggcctcctggaagacctggacaacctcatcctggaggacctgaaggaggaggaggaggaagaggaggaggtggaggacgaggagggcgggcccagggagtgacccctgccaggtgcagatacaaaccagacacggtctgtggctactttgtgttattataagatatgagctcaaaccgagatatgaatgaccttggggagccatctgaggccaagatattgacgggggggattcctgggtcccattttcagcgcccagggtcacagatccacagtgggaagttctgtgggacacattggcactgagccacaaagaaggtgtggccagaacaacttgggctcctgctgaccaatgtcctctagggcctaggggacagaggaacacagagtcacagcttcaggggccgaatgagcatggcggccttcctgagagaatatgccccaccacgaaactcagcccagtagacaccatcctggtagcggcttcggtagtggccgccgtggtgccacacaccgttgaggttggagtgggcacaggcatggtaccaccagcctccccgctggtacagggcacagttacctgaggggagagagagagtccatgtcctctcaccagaataaaagcctctacctgcacctcacagtgcaaggcttttgccaggcatcccctggcccctcccattcttattgaatacaagccctgatcttccatctcctcagcaaaaaaataggagccctggccccccaactttcttcagagtaatagccttaattccttccctatctccttaccaaagtacaagtcacatctttcccaccttttctgcaaactaggagtctaccgttcattcctttatcaaagaaaagtatctacttcctttctagaataagagtactagctctcaccctctgccctttacttgaacaggagtcttgattctttttttgcctcatcagagaaggaatctggactccccatccccccaccaggataaaagtcctgacctttgttctcttgacggaataaaagcttgcttatcctt

SEQ ID NO: 419 - protein, 291 aa, Homo sapiens
MSQEGVELEKSVRRLREKFHGKVSSKKAGALMRKFGSDHTGVGRSIVYGVKQKDGQELSNDLDAQDPPEDMKQDRDIQAVATSLLPLTEANLRMFQRAQDDLIPAVDRQFACSSCDHVWWRRVPQRKEVSRCRKCRKRYEPVPADKMWGLAEFHCPKCRHNFRGWAQMGSPSPCYGCGFPVYPTRILPPRRDRDPDRRSTHTHSCSAADCYNRREPHVPGTSCAHPKSRKQNHLPKVLHPSNPHISSGPTVATCLSQGGLLEDLDNLILEDLKEEEEEEEEVEDEEGGPRE

SEQ ID NO: 420 - DNA, 7101 bp, Homo sapiens
tgtggctgtgacctggcacaagggggcttcttcataaagaacggagagtatctctgcaccctggactaccagcggatgtacgggacacgctgccatggctgtggggagttcgtggagggcgaagtggtgactgctctgggcaagacctaccatcccaattgctttgcttgtactatctgcaagcgcccgtttccacccggagaccgagtcacattcaatgggagagactgcctttgtcaactctgtgcacagccgatgtcgtccagtccgaaagaaaccaccttctccagcaattgtgccggctgcggaagagatatcaagaacgggcaggcgctgctggcgctggataagcagtggcacttggggtgctttaaatgcaagtcctgcgggaaggtcctcaccggggagtacatcagcaaggatggtgctccgtactgtgaaaaggactaccagggactctttggggtgaaatgtgaggcgtgtcaccagtttatcacagggaaagtcctggaggcaggtgacaaacattaccaccccagctgtgcacgatgcagcagatgcaaccagatgttcacagaaggagaggaaatgtatcttcaaggctccaccgtttggcatcccgactgtaagcaatctacgaagaccgaggaaaagctgcggcctaccaggacatcctcggaaagtatttattctaggccaggctccagtattcctggctcaccaggtcatactatctatgcaaaagtagacaatgagatcctggattacaaggatttagcagccattccgaaggtcaaggcaatttatgacattgaacgtccagatcttattacctatgagcctttctacacttcgggctatgatgacaaacaggagagacagagccttggagagtctccgaggactttgtctcctactccatcagcagaagggtaccaggatgttcgggatcggatgatccatcggtccacgagccagggctccatcaactcccctgtgtacagccgccacagctacactccaaccacgtcccgctctccccagcatttccacagacctggcaatgagccgtccagcggccggaactcccctctcccttaccggccagacagccgccctctaactccaacttacgctcaggcccctaaacatttccatgttccagatcaaggaatcaacatttaccgaaagccacccatctacaaacagcatgctgccttggcagcccagagcaagtcctcagaagatatcatcaagttttccaagttcccagcagcccaggcaccagaccccagcgagacaccagagattgagacggaccactggcctggtcccccctcatttgctgtcataggacctgacatgaaacgcagatctagtggcagagaggaagatgatgaggaacttctgagacgtcggcagcttcaagaagagcaattaatgaagcttaactcaggcctgggacagttgatcttgaaagaagagatggagaaagagagccgggaaaggtcatctctgttagccagtcgctacgattctcccatcaactcagcttcacatattccatcatctaaaactgcatctctccctggctatggaagaaatgggcttcaccggcctgtttctaccgacttcgctcagtataacagctatggggatgtcagcgggggagtgcgagattaccagacactcccagatggccacatgcctgcaatgagaatggaccgaggagtgtctatgcccaacatgttggaaccaaagatatttccatatgaaatgctcatggtgaccaacagagggcgaaacaaaatcctcagagaggtggacagaaccaggctggagcgccacttagcccctgaagtgtttcgggaaatctttggaatgtccatacaggagtttgacaggttacctctttggagacgcaacgacatgaagaaaaaagcaaaactcttctaagtcccactcgtgaatggcaattagagaaaggactgacagtggcggtgccccataggatgtcatattgaggcccaaacttgattggagaatttgcaaactaccgtcgctcagcaacaccaaaaagagaaagtctggttaaaacaccatgagtcaaatgtcgggccagccaacagtaacacttgccaagaagcatggcgtagaaatttctatgttccgaaacacagagtagtgtccacatgtgaccttttcacattaccttatgtatacaacaggagctgcgttgttttcttctttttcttttcctttatctgttgtccaacaacagtgctgactgtccggataagagctggcaagtgcccttaggatgccgcatgggaaaaatcggttatcataatttcaaagtataaatatatttattatgtagcgctgcggctaagaaggaagagtgaggggtctgtccatggggtggcagtgatttcacacccgcctttcttgaatggcttcgtgttactcagccgtgccctggcaggaatggaactccatcagggaacagggcagctctgtttgaatggggtgaaaaacagcaaaattaattcttagcaagctccttgttctctactgttcaccgggacctggctggcaaatgacttagctattagtatatttaaaaactgttcaaaagcaaaagagaaggaacaggaatgaaaggaaaccttcccttaactctttctgcttcccatagcaggtctggttcctgctccccgcctaggacaggagctgtctggagctccacctttgcaaagaaaggaaaaacacaaattgcccccagattggcccagtggcatgccattaggtgattttgcgtaggggccatatcattcatggccaaaaaaaaccaaaaagcaaaaaacaaaaacaagtcccatgtcctactgactctagttcttccagtcgttatcctctgctgtctctctggcatcctatgaatcagatcaagcccatgctgttgttggtttttaaggtttctttcaataataggctaaggaaagacatgtttttctcttttaaatctctgcaactccaaagtagactccttcgaacgtatttaatttggccttttcagctttcttcttgcccagctctgtcgaattcatgggtgtgtgtgcacatgttggtttcactcacccagagtaattttgtgagcatgcatgtgctttttaatttctgcttgaatgtttgtcctgctgtgttgcagcttctaaagacattgtcaccgagtgtgtgtgactcaaagatcaagagtgaggctaaactgcgaccccaacatcacttccttcatggaaaggtgttggcgctgatgtagctcatggaaggatcagactgggaaccacagaggaaggatgaggtgggatgtggaggtcagagcatctcacgagagtccctcaggctctgcaacactagattcgaatatgagcctagggtttccccaacacgtgcgtgcatatgaaaccacatcatgattcccgacgtgagttagatgagggagagtttgtgtaactccacacccaggagggtaagccactttattatcatgctttggggctgtgcttaagaatttaagctctgttttaaagccgaagaagaaaacatttgaatttaccttcatatgccactaagaacaaaagctctgaagttcttcctgctggcaccaaatattaggattacaagctgtctctctgacaccagtggtaaaaaagcaagtagaatagtttctgagtctgtgttgcagcctctgacacgtggctcactgctgtcatttggggggtggaatgaacagtcactgttctatagcatcctcctgtgctcttacctaaggaatctaaattgtcctagccttccattgctatgcactgaatgaggactactctcgtgtgtgtgtgtgtgtgtgtgtgtgtgtgtgtgtgtgtgtgtgtgtgttggatctactaacatgtttagcaaatggctctgacagggtggccatgagcagatgagaccagctcttgcttggttggaagccacactgcagtttgcagtttagcctttggtgtctcagtggcctcttgcttattccatgctttttctatcccatcctctctctgtgccctcctgcaatggcagccttggcacaatgcctgggtgtcctcatccttgctttactctggaaagtgtggggatggagaggatggtgcatttccagtgcttccttacctgtcaataacaatggtggccacctgggtcccagcacttggctggtggagagatttttttcattatggagctaataaagggtccctacgttttacattgattaatgaattatcacccagacatgtgcagatgaaatgtcaatataagaaaaatcaaggtatttgggaaacatgggcataatcaggtagttttgctaaaattcctcttccttggtctacataaagaagacatgggtctgtcatagaatggggacattagactgaaaactgggacaacccccttccttattttatagagactaggagttaaggggcctgcctaagattgcagtgataaagaactgaaccctaaatcagctcccactaatgaaaccctgctttccttgtatcttttaaactcagttctgcatccaacttgagaagaaaaaaagcttctttccatatcaagtaccatatgagttcatttaaactgcaccttgcagaaatgcattgccagaaagcaccagtagcctcctatctgcaagcagagtagtgctctgctctggggaggggtcattggaaaccataatgcagagtgggccccctactccatttcccagcaaaaggctccagctggagggatgggttgtggggcaacctggttcctgctaactgccagattgaatgtgtgggctagaatgcctgcgcatttagttaaactgggctcagcatgcttgtcctcaaaatgtccatcctggtcacagcacacaagatggctattggtctgcttttaccctaccctgtactatacatgaaaattccagttattaacacactcaaactggtggagcttgttcaccctaggaaggggattgtatatatggcaggcttccctggtgccgatgtaaagggctacatttgggaacatttgacttccttgggactcttaagtgcatactgatggcatgaagtaaaaggggcctcaatgatgataggaaaatcagttcttttaaaatttcttcaagaaaatccaggctatcacatagtctttctgtgtgacttattaggagataggaagagcattgggaaacttgcacagctagctatgcatctacattttggtttggggttagttatgaaatgttcttaatatgacgtgttcaataacttcacataaacttcctgttctccaaaacctcaaagagatagagttaatgagttgttgtttttttttaaatgggggtagttttctatctgtcatgggctctagcatctactccgctacccaattctgtcatctccaagctgagtttcctcttctgaggcagaggctggagcagttctttttcagttctcatcctctccatcccaatccagtatatcaatcaactctaactcggagacgtctagctggcaatgtttctaaaactttcactggatttctttagacattgaagcaaacatttttttctaagaattgcttctcagatgatgatatcaaatgtatatgcttttgcaagtttgaaaagttcaaattaaccacttttgactaggtaagtctttctaaaaaccatttaaagctaactgggtcttagcatcctcctgtgtatggaagagacaggtgaccgctccaggttgggtgctcacagaacccttttcctgactctcatggaagatggtggaaggaaaatagactgtctcatcaaccctcctgtgtcctctgaagcaatctcagtttttattaaccacctcttctgtgtttctggtagctatttaacctgtatttaatctgtacttcctatgccagcctcaattttatttgatttttaaaattattctcttctaaccaatgaagtgtttgtcagtatgccccaaagcttgctcttttgtgctcccttttgaataactttctatccagaaaaagagattatttgggacttgagatttgcagtgataccaacttatagcaatgatgtactttaagggaactacccaactatgttgtgatagaagaaagagaaaccttcactttggcattttttttaatcactgtttatttttctgtttgcggcccaggaagcagtgggaggtggtggcagatatgctttgcatatggattgttatgtttttatttgggcaagtttaatcatggaaaactcaaaaagaaggggggaaatggtcagtttaagccaaaagaaactttctaaacaatgtataggtacacagcaaaattaaacaaatccaacaatttctgaagcttagtgtaattgagtggtggttgttattcaataaaattattcccaaaagtgtttctcctaagagtgcagttcccatgagtcacttcctgaacccattgaccaaaggtggacagagacaatcctgtagaccttgacattcagaaagatgtgagctgcttactgatcatatatgcatacgtttctttacagcagaggaaaccattgtccacaaaactgatgttcttttggggttttatgtacagacttgtccaatcatgtgtgtggttcctgcgagttgctgatgactccgcattgaagctctctgagttctttgattttaagttgggtttatggaattttttcaaatgttggaaggcgtgtggttcttcctgccctccctccccttttggaaatatgaaagcaaatgtttagaagaattccttttgaaaagctgtgtcgtgttccctgtgaaactgagcaggtgtgtgttggcgcgctaagtgccacatgcttgtgtgtagaggaggaggtggccctgccggctccgcgctgctgtgcctgtgatccctacctgctccccgctcctgttgccagcagcactcactgcactcctttgtcatatactctgcatcactgtcatactcacaacttcgtgaataaagttgtgtgctttattcgtc

SEQ ID NO: 421 - protein, 626 aa, Homo sapiens
MYGTRCHGCGEFVEGEVVTALGKTYHPNCFACTICKRPFPPGDRVTFNGRDCLCQLCAQPMSSSPKETTFSSNCAGCGRDIKNGQALLALDKQWHLGCFKCKSCGKVLTGEYISKDGAPYCEKDYQGLFGVKCEACHQFITGKVLEAGDKHYHPSCARCSRCNQMFTEGEEMYLQGSTVWHPDCKQSTKTEEKLRPTRTSSESIYSRPGSSIPGSPGHTIYAKVDNEILDYKDLAAIPKVKAIYDIERPDLITYEPFYTSGYDDKQERQSLGESPRTLSPTPSAEGYQDVRDRMIHRSTSQGSINSPVYSRHSYTPTTSRSPQHFHRPGNEPSSGRNSPLPYRPDSLPLTPTYAQAPKHFHVPDQGINIYRKPPIYKQHRALAAQSKSSEDIIKFSKFPAAQAPDPSETPKIETDHWPGPPSFAVVGPDMKRRSSGREEDDEELLRRRQLQEEQLMKLNSGLGQLILKEEMEKESRERSSLLASRYDSPINSASHIPSSKTASLPGYGRNGLHRPVSTDFAQYNSYGDVSGGVRDYQTLPDGHMPAMRMDRGVSMPNMLEPKIFPYEMLMVTNRGRNKILREVDRTRLERHLAPEVFREIFGMSIQEFDRLPLWRRNDMKKKAKLF

SEQ ID NO: 422 - DNA, 2591 bp, Homo sapiens
cccggacgtgcggctcccctcggcctcctcgccatggacgcggacgactcccgggcccccaagggctccttgcggaagttcctggagcacctctccggggccggcaaggccatcggcgtgctgaccagcggcggggatgctcaaggtatgaacgctgccgtccgtgccgtggtgcgcatgggtatctacgtgggggccaaggtgtacttcatctacgagggctaccagggcatggtggacggaggctcaaacatcgcagaggccgactgggagagtgtctccagcatcctgcaagtgggcgggacgatcattggcagtgcgcggtgccaggccttccgcacgcgggaaggccgcctgaaggctgcttgcaacctgctgcagcgcggcatcaccaacctgtgtgtgatcggcggggacgggagcctcaccggggccaacctcttccggaaggagtggagtgggctgctggaggagctggccaggaacggccagatcgataaggaggccgtgcagaagtacgcctacctcaacgtggtgggcatggtgggctccatcgacaatgatttctgcggcaccgacatgaccatcggcacggactccgccctgcacaggatcatcgaggtcgtcgacgccatcatgaccacggcccagagccaccagaggaccttcgttctggaggtgatgggacgacactgtgggtacctggccctggtgagtgccttggcctgcggtgcggactgggtgttccttccagaatctccaccagaggaaggctgggaggagcagatgtgtgtcaaactctcggagaaccgtgcccggaaaaaaaggctgaatattattattgtggctgaaggagcaattgatacccaaaataaacccatcacctctgagaaaatcaaagagcttgtcgtcacgcagctgggctatgacacacgtgtgaccatcctcgggcacgtgcagagaggagggaccccttcggcattcgacaggatcttggccagccgcatgggagtggaggcagtcatcgccttgctagaggccaccccggacaccccagcttgcgtcgtgtcactgaacgggaaccacgccgtgcgcctgccgctgatggagtgcgtgcagatgactcaggatgtgcagaaggcgatggacgagaggagatttcaagatgcggttcgactccgagggaggagctttgcgggcaacctgaacacctacaagcgacttgccatcaagctgccggatgatcagatcccaaagaccaattgcaacgtagctgtcatcaacgtgggggcacccgcggctgggatgaacgcggccgtacgctcagctgtgcgcgtgggcattgccgacggccacaggatgctcgccatctatgatggctttgacggcttcgccaagggccagatcaaagaaatcggctggacagatgtcgggggctggaccggccaaggaggctccattcttgggacaaaacgcgttctcccggggaagtacttggaagagatcgccacacagatgcgcacgcacagcatcaacgcgctgctgatcatcggtggattcgaggcctacctgggactcctggagctgtcagccgcccgggagaagcacgaggagttctgtgtccccatggtcatggttcccgctactgtgtccaacaatgtgccgggttccgatttcagcatcggggcagacaccgccctgaacactatcaccgacacctgcgaccgcatcaagcagtccgccagcggaaccaagcggcgcgtgttcatcatcgagaccatgggcggctactgtggctacctggccaacatgggggggctcgcggccggagctgatgccgcatacattttcgaagagcccttcgacatcagggatctgcagtccaacgtggagcacctgacggagaaaatgaagaccaccatccagagaggccttgtgctcagaaatgagagctgcagtgaaaactacaccaccgacttcatttaccagctgtattcagaagagggcaaaggcgtgtttgactgcaggaagaacgtgctgggtcacatgcagcagggtggggcaccctctccatttgatagaaactttggaaccaaaatctctgccagagctatggagtggatcactgcaaaactcaaggaggcccggggcagaggaaaaaaatttaccaccgatgattccatttgtgtgctgggaataagcaaaagaaacgttatttttcaacctgtggcagagctgaagaagcaaacggattttgagcacaggattcccaaagaacagtggtggctcaagctacggcccctcatgaaaatcctggccaagtacaaggccagctatgacgtgtcggactcaggccagctggaacatgtgcagccctggagtgtctgacccagtcccgcctgcatgtgcctgcagccaccgtggactgtctgtttttgtaacacttaagttattttatcagcactttatgcacgtattattgacattaatacctaatcggcgagtgcccatctgccccaccagctccagtgcgtgctgtctgtggagtgtgtctcatgctttcagatgtgcatatgagcagaattaattaa

SEQ ID NO: 423 - protein, 784 aa, Homo sapiens
MDADDSRAPKGSLRKFLEHLSGAGKAIGVLTSGGDAQGMNAAVRAVVRMGIYVGAKVYFIYEGYQGMVDGGSNIAEADWESVSSILQVGGTIIGSARCQAFRTREGRLKAACNLLQRGITNLCVIGGDGSLTGANLFRKEWSGLLEELARNGQIDKEAVQKYAYLNVVGMVGSIDNDFCGTDMTIGTDSALHRIIEVVDAIMTTAQSHQRTFVLEVMGRHCGYLALVSALACGADWVFLPESPPEEGWEEQMCVKLSENRARKKRLNIIIVAEGAIDTQNKPITSEKIKELVVTQLGYDTRVTILGHVQRGGTPSAFDRILASRMGVEAVIALLEATPDTPACVVSLNGNHAVRLPLMECVQMTQDVQKAMDERRFQDAVRLRGRSFAGNLNTYKRLAIKLPDDQIPKTNCNVAVINVGAPAAGMNAAVRSAVRVGIADGHRMLAIYDGFDGFAKGQIKEIGWTDVGGWTGQGGSILGTKRVLPGKYLEEIATQMRTHSINALLIIGGFEAYLGLLELSAAREKHEEFCVPMVMVPATVSNNVPGSDFSIGADTALNTITDTCDRIKQSASGTKRRVFIIETMGGYCGYLANMGGLAAGADAAYIFEEPFDIRDLQSNVEHLTEKMKTTIQRGLVLRNESCSENYTTDFIYQLYSEEGKGVFDCRKNVLGHMQQGGAPSPFDRNFGTKISARAMEWITAKLKEARGRGKKFTTDDSICVLGISKRNVIFQPVAELKKQTDFEHRIPKEQWWLKLRPLMKILAKYKASYDVSDSGQLEHVQPWSV

SEQ ID NO: 424 - DNA, 5434 bp, Homo sapiens
cgtccgcgtggggggggtgtgtgcccgccttgcgcatgcgtgttccctgggcatggccggctccgttccatccttctgcacagggtatcgcctctctccgtttggtacatcccctcctcccccacgcccggactggggtggtagacgcgcctccgctcatcgcccctccccatcggtttccgcgcgaaaagccggggcgcctgcgctgccgccgccgcgtctgctgaagcctccgagatgccggcgcgtaccgccccagcccgggtgcccacactggccgtcccggccatctcgctgcccgacgatgtccgcaggcggctcaaagatttggaaagagacagcttaacagaaaaggaatgtgtgaaggagaaattgaatctcttgcacgaatttctgcaaacagaaataaagaatcagttatgtgacttggaaaccaaattacgtaaagaagaattatccgaggagggctacctggctaaagtcaaatcccttttaaataaagatttgtccttggagaacggtgctcatgcttacaaccgggaagtgaatggacgtctagaaaacgggaaccaagcaagaagtgaagcccgtagagtgggaatggcagatgccaacagcccccccaaacccctttccaaacctcgcacgcccaggaggagcaagtccgatggagaggctaagcctgaaccttcacctagccccaggattacaaggaaaagcaccaggcaaaccaccatcacatctcattttgcaaagggccctgccaaacggaaacctcaggaagagtctgaaagagccaaatcggatgagtccatcaaggaagaagacaaagaccaggatgagaagagacgtagagttacatccagagaacgagttgctagaccgcttcctgcagaagaacctgaaagagcaaaatcaggaacgcgcactgaaaaggaagaagaaagagatgaaaaagaagaaaagagactccgaagtcaaaccaaagaaccaacacccaaacagaaactgaaggaggagccggacagagaagccagggcaggcgtgcaggctgacgaggacgaagatggagacgagaaagatgagaagaagcacagaagtcaacccaaagatctagctgccaaacggaggcccgaagaaaaagaacctgaaaaagtaaatccacagatttctgatgaaaaagacgaggatgaaaaggaggagaagagacgcaaaacgacccccaaagaaccaacggagaaaaaaatggctcgcgccaaaacagtcatgaactccaagacccaccctcccaagtgcattcagtgcgggcagtacctggacgaccctgacctcaaatatgggcagcacccaccagacgcggtggatgagccacagatgctgacaaatgagaagctgtccatctttgatgccaacgagtctggctttgagagttatgaggcgcttccccagcacaaactgacctgcttcagtgtgtactgtaagcacggtcacctgtgtcccatcgacaccggcctcatcgagaagaatatcgaactcttcttttctggttcagcaaaaccaatctatgatgatgacccgtctcttgaaggtggtgttaatggcaaaaatcttggccccataaatgaatggtggatcactggctttgatggaggtgaaaaggccctcatcggcttcagcacctcatttgccgaatacattctgatggatcccagtcccgagtatgcgcccatatttgggctgatgcaggagaagatctacatcagcaagattgtggtggagttcctgcagagcaattccgactcgacctatgaggacctgatcaacaagatcgagaccacggttcctccttctggcctcaacttgaaccgcttcacagaggactccctcctgcgacacgcgcagtttgtggtggagcaggtggagagttatgacgaggccggggacagtgatgagcagcccatcttcctgacgccctgcatgcgggacctgatcaagctggctggggtcacgctgggacagaggcgagcccaggcgaggcggcagaccatcaggcattctaccagggagaaggacaggggacccacgaaagccaccaccaccaagctggtctaccagatcttcgatactttcttcgcagagcaaattgaaaaggatgacagagaagacaaggagaacgcctttaagcgccggcgatgtggcgtctgtgaggtgtgtcagcagcctgagtgtgggaaatgtaaagcctgcaaggacatggttaaatttggtggcagtggacggagcaagcaggcttgccaagagcggaggtgtcccaatatggccatgaaggaggcagatgacgatgaggaagtcgatgataacatcccagagatgccgtcacccaaaaaaatgcaccaggggaagaagaagaaacagaacaagaatcgcatctcttgggtcggagaagccgtcaagactgatgggaagaagagttactataagaaggtgtgcattgatgcggaaaccctggaagtgggggactgtgtctctgttattccagatgattcctcaaaaccgctgtatctagcaagggtcacggcgctgtgggaggacagcagcaacgggcagatgtttcacgcccactggttctgcgctgggacagacacagtcctcggggccacgtcggaccctctggagctgttcttggtggatgaatgtgaggacatgcagctttcatatatccacagcaaagtgaaagtcatctacaaagccccctccgaaaactgggccatggagggaggcatggatcccgagtccctgctggagggggacgacgggaagacctacttctaccagctgtggtatgatcaagactacgcgagattcgagtcccctccaaaaacccagccaacagaggacaacaagttcaaattctgtgtgagctgtgcccgtctggctgagatgaggcaaaaagaaatccccagggtcctggagcagctcgaggacctggatagccgggtcctctactactcagccaccaagaacggcatcctgtaccgagttggtgatggtgtgtacctgccccctgaggccttcacgttcaacatcaagctgtccagtcccgtgaaacgcccacggaaggagcccgtggatgaggacctgtacccagagcactaccggaaatactccgactacatcaaaggcagcaacctggatgcccctgagccctaccgaattggccggatcaaagagatcttctgtcccaagaagagcaacggcaggcccaatgagactgacatcaaaatccgggtcaacaagttctacaggcctgagaacacccacaagtccactccagcgagctaccacgcagacatcaacctgctctactggagcgacgaggaggccgtggtggacttcaaggctgtgcagggccgctgcaccgtggagtatggggaggacctgcccgagtgcgtccaggtgtactccatgggcggccccaaccgcttctacttcctcgaggcctataatgcaaagagcaaaagctttgaagatcctcccaaccatgcccgtagccctggaaacaaagggaagggcaagggaaaagggaagggcaagcccaagtcccaagcctgtgagccgagcgagccagagatagagatcaagctgcccaagctgcggaccctggatgtgttttctggctgcggggggttgtcggagggattccaccaagcaggcatctctgacacgctgtgggccatcgagatgtgggaccctgcggcccaggcgttccggctgaacaaccccggctccacagtgttcacagaggactgcaacatcctgctgaagctggtcatggctggggagaccaccaactcccgcggccagcggctgccccagaagggagacgtggagatgctgtgcggcgggccgccctgccagggcttcagcggcatgaaccgcttcaattcgcgcacctactccaagttcaaaaactctctggtggtttccttcctcagctactgcgactactaccggccccggttcttcctcctggagaatgtcaggaactttgtctccttcaagcgctccatggtcctgaagctcaccctccgctgcctggtccgcatgggctatcagtgcaccttcggcgtgctgcaggccggtcagtacggcgtggcccagactaggaggcgggccatcatcctggccgcggcccctggagagaagctccctctgttcccggagccactgcacgtgtttgctccccgggcctgccagctgagcgtggtggtggatgacaagaagtttgtgagcaacataaccaggttgagctcgggtcctttccggaccatcacggtgcgagacacgatgtccgacctgccggaggtgcggaatggagcctcggcactggagatctcctacaacggggagcctcagtcctggttccagaggcagctccggggcgcacagtaccagcccatcctcagggaccacatctgtaaggacatgagtgcattggtggctgcccgcatgcggcacatccccttggccccagggtcagactggcgcgatctgcccaacatcgaggtgcggctctcagacggcaccatggccaggaagctgcggtatacccaccatgacaggaagaacggccgcagcagctctggggccctccgtggggtctgctcctgcgtggaagccggcaaagcctgcgaccccgcagccaggcagttcaacaccctcatcccctggtgcctgccccacaccgggaaccggcacaaccactgggctggcctctatggaaggctcgagtgggacggcttcttcagcacaaccgtcaccaaccccgagcccatgggcaagcagggccgcgtgctccacccagagcagcaccgtgtggtgagcgtgcgggagtgtgcccgctcccagggcttccctgacacctaccggctcttcggcaacatcctggacaagcaccggcaggtgggcaatgccgtgccaccgcccctggccaaagccattggcttggagatcaagctttgtatgttggccaaagcccgagagagtgcctcagctaaaataaaggaggaggaagctgctaaggactagttctgccctcccgtcacccctgtttctggcaccaggaatccccaacatgcactgatgttgtgtttttaacatgtcaatctgtccgttcacatgtgtggtacatggtgtttgtggccttggctgacatgaagctgttgtgtgaggttcgcttatcaactaatgatttagtgatcaaattgtgcagtactttgtgcattctggattttaaaagttttttattatgcattatatcaaatctaccactgtatgagtggaaattaagactttatgtagtttttatatgttgtaatatttcttcaaataaatctctcctataaaccaaaaaaaaaaaaaaaaaaaaaaaaaa

SEQ ID NO: 425 - protein, 1616 aa, Homo sapiens
MPARTAPARVPTLAVPAISLPDDVRRRLKDLERDSLTEKECVKEKLNLLHEFLQTEIKNQLCDLETKLRKEELSEEGYLAKVKSLLNKDLSLENGAHAYNREVNGRLENGNQARSEARRVGMADANSPPKPLSKPRTPRRSKSDGEAKPEPSPSPRITRKSTRQTTITSHFAKGPAKRKPQEESERAKSDESIKEEDKDQDEKRRRVTSRERVARPLPAEEPERAKSGTRTEKEEERDEKEEKRLRSQTKEPTPKQKLKEEPDREARAGVQADEDEDGDEKDEKKHRSQPKDLAAKRRPEEKEPEKVNPQISDEKDEDEKEEKRRKTTPKEPTEKKMARAKTVMNSKTHPPKCIQCGQYLDDPDLKYGQHPPDAVDEPQMLTNEKLSIFDANESGFESYEALPQHKLTCFSVYCKHGHLCPIDTGLIEKNIELFFSGSAKPIYDDDPSLEGGVNGKNLGPINEWWITGFDGGEKALIGFSTSFAEYILMDPSPEYAPIFGLMQEKIYISKIVVEFLQSNSDSTYEDLINKIETTVPPSGLNLNRFTEDSLLRHAQFVVEQVESYDEAGDSDEQPIFLTPCMRDLIKLAGVTLGQRRAQARRQTIRHSTREKDRGPTKATTTKLVYQIFDTFFAEQIEKDDREDKENAFKRRRCGVCEVCQQPECGKCKACKDMVKFGGSGRSKQACQERRCPNMAMKEADDDEEVDDNIPEMPSPKKMHQGKKKKQNKNRISWVGEAVKTDGKKSYYKKVCIDAETLEVGDCVSVIPDDSSKPLYLARVTALWEDSSNGQMFHAHWFCAGTDTVLGATSDPLELFLVDECEDMQLSYIHSKVKVIYKAPSENWAMEGGMDPESLLEGDDGKTYFYQLWYDQDYARFESPPKTQPTEDNKFKFCVSCARLAEMRQKEIPRVLEQLEDLDSRVLYYSATKNGILYRVGDGVYLPPEAFTFNIKLSSPVKRPRKEPVDEDLYPEHYRKYSDYIKGSNLDAPEPYRIGRIKEIFCPKKSNGRPNETDIKIRVNKFYRPENTHKSTPASYHADINLLYWSDEEAVVDFKAVQGRCTVEYGEDLPECVQVYSMGGPNRFYFLEAYNAKSKSFEDPPNHARSPGNKGKGKGKGKGKPKSQACEPSEPEIEIKLPKLRTLDVFSGCGGLSEGFHQAGISDTLWAIEMWDPAAQAFRLNNPGSTVFTEDCNILLKLVMAGETTNSRGQRLPQKGDVEMLCGGPPCQGFSGMNRFNSRTYSKFKNSLVVSFLSYCDYYRPRFFLLENVRNFVSFKRSMVLKLTLRCLVRMGYQCTFGVLQAGQYGVAQTRRRAIILAAAPGEKLPLFPEPLHVFAPRACQLSVVVDDKKFVSNITRLSSGPFRTITVRDTMSDLPEVRNGASALEISYNGEPQSWFQRQLRGAQYQPILRDHICKDMSALVAARMRHIPLAPGSDWRDLPNIEVRLSDGTMARKLRYTHHDRKNGRSSSGALRGVCSCVEAGKACDPAARQFNTLIPWCLPHTGNRHNHWAGLYGRLEWDGFFSTTVTNPEPMGKQGRVLHPEQHRVVSVRECARSQGFPDTYRLFGNILDKHRQVGNAVPPPLAKAIGLEIKLCMLAKARESASAKIKEEEAAKD

SEQ ID NO: 426 - DNA, 2610 bp, Homo sapiens
cggacgcgtggggcccggggggctgaggcgcccgccgcctgccgcgggggccgctcgcgtcctccatggaggccggagaggaaccgctgctgctggccgaactcaagcccgggcgcccccaccagtttgattggaagtccagctgtgaaacctggagcgtcgccttctccccagatggctcctggtttgcttggtctcaaggacactgcatcgtcaaactgatcccctggccgttggaggagcagttcatccctaaagggtttgaagccaaaagccgaagtagcaaaaatgagacgaaagggcggggcagcccaaaagagaagacgctggactgtggtcagattgtctgggggctggccttcagcccgtggccttccccacccagcaggaagctctgggcacgccaccacccccaagtgcccgatgtctcttgcctggttcttgctacgggactcaacgatgggcagatcaagatctgggaggtgcagacagggctcctgcttttgaatctttccggccaccaagatgtcgtgagagatctgagcttcacacccagtggcagtttgattttggtctccgcgtcacgggataagactcttcgcatctgggacctgaataaacacggtaaacagattcaagtgttatcgggccacctgcagtgggtttactgctgttccatctccccagactgcagcatgctgtgctctgcagctggagagaagtcggtctttctatggagcatgaggtcctacacgttaattcggaagctagagggccatcaaagcagtgttgtctcttgtgacttctcccccgactctgccctgcttgtcacggcttcttacgataccaatgtgattatgtgggacccctacaccggcgaaaggctgaggtcactccaccacacccaggttgaccccgccatggatgacagtgacgtccacattagctcactgagatctgtgtgcttctctccagaaggcttgtaccttgccacggtggcagatgacagactcctcaggatctgggccctggaactgaaaactcccattgcatttgctcctatgaccaatgggctttgctgcacattttttccacatggtggagtcattgccacagggacaagagatggccacgtccagttctggacagctcctagggtcctgtcctcactgaagcacttatgccggaaagcccttcgaagtttcctaacaacttaccaagtcctagcactgccaatccccaagaaaatgaaagagttcctcacatacaggactttttaagcaacaccacatcttgtgcttctttgtagcagggtaaatcgtcctgtcaaagggagttgctggaataatgggccaaacatctggtcttgcattgaaatagcatttctttgggattgtgaatagaatgtagcaaaaccagattccagtgtactagtcatggatctttctctccctggcatgtgaaagtcagtcttagaggaagagattccacttgcacggcaacagagccttacgttaaattttcagtccagttatgaacagcaagtgttgaactctttctgcttgttttgattcaaagtgcagttactgatgttgttttgattatgcaactaagtaggcctccagagcctctctagtggcagagcagctcacactccctccgctgggaacgatggcttctgcctagtacctatccttgtgtttctgatgcagtggtagcattggttcaagttctctcctgctgtggtcagagttgcttcgatgttggccaagtgcttttcttcttgggctcccttctgacctgcaggacagttttcctggagccatttggtatgaggtattaatttagcttaactaaattacaggggactcagaggccgtgctcctgaccgatccagacactattactggcttttttttttttttaacaatggtgtgcatgtgcaggaaatgacaaatttgtatgtcagattatacaaggatgtattcttaaaccgcatgactattcagatggctactgagttatcagtggccatttattagcatcatatttatttgtattttctcaacagatgttaaggtacaactgtgtttttctcgattatctaaaaaccatagtacttaaattgaacagttgcaaagatgtcttaattgtgtaaagaattggtgtagtcatgactttagctgatactcttatgtacgagatctgtctctgctgtttaacttcattggattaatcagctggtttcaactctactgcgaaacaaaaatagctccttaaaagtactgttctccttcagtggcatgtagttatctaatcaagacacctcattcaaacaaaacctgccttaggaaaatttaatatattttaaattattttaaaagaaatacaacatcttattctttagctttcttaatcggtgctttatggaggccagtgtaacgttacatgactcgttgagaaagttgaggaatttcctctaccacctttgttgcttgaagaaaaacatgtcttttcaaaatgagaggctttcattgaagaaaagaaaaaaacaacagttaaaaaaaaaaaaaaaaaaaaaaaaaaaaaaaaaaaaaaaaaaaaaaaaaa

SEQ ID NO: 427 - protein, 404 aa, Homo sapiens
MEAGEEPLLLAELKPGRPHQFDWKSSCETWSVAFSPDGSWFAWSQGHCIVKLIPWPLEEQFIPKGFEAKSRSSKNETKGRGSPKEKTLDCGQIVWGLAFSPWPSPPSRKLWARHHPQVPDVSCLVLATGLNDGQIKIWEVQTGLLLLNLSGHQDVVRDLSFTPSGSLILVSASRDKTLRIWDLNKHGKQIQVLSGHLQWVYCCSISPDCSMLCSAAGEKSVFLWSMRSYTLIRKLEGHQSSVVSCDFSPDSALLVTASYDTNVIMWDPYTGERLRSLHHTQVDPAMDDSDVHISSLRSVCFSPEGLYLATVADDRLLRIWALELKTPIAFAPMTNGLCCTFFPHGGVIATGTRDGHVQFWTAPRVLSSLKHLCRKALRSFLTTYQVLALPIPKKMKEFLTYRTF

SEQ ID NO: 428 - DNA, 1470 bp, Homo sapiens
agagccgccagcgaggctggggatgggggcgccgctgctctctcccggctggggagccggggctgccggccggcgctggtggatgctgctggcgcccctgctgccggcgctgctgctggtgcggcccgcgggggccctggtggaggggctctactgcggcacgcgggactgctacgaggtgctgggcgtgagccgctcggcgggcaaggcggagatcgcgcgggcctaccgccagctggcccggcgctaccaccctgaccgctaccggccccagcccggagacgagggccccgggcggacgccgcagagcgccgaggaggctttcctgctggtggcaaccgcctacgagacactcaaggtctctcaggcagctgcagagcttcaacagtactgtatgcagaatgcctgcaaggatgccctgctggtgggtgttccagctggaagtaaccccttccgggagcctagatcctgtgctttactctgaagactcgagagaagtttgctgaggaatgccttcaagcacaaagtgatgaatgactgccttcaagtctcaagaaaacacttttccctaacttttagagatatttcagccctttcctgtggcctggtcctatagccaaaatcacagatattcatgagtttctacttgagtgagaaaactgggtgaaggaatagaattttaaatagtaataactgcttgttttttttgtgcaagtacttttatacataagataaacaaaaaccttaccaccaaacataccaaaatgcacctctttcataagtgagttactaagatttctatacctggaatatcatgtatgtttcatttactggatgtttacattttaggaaggaaaatagttttgtttatttaaacaactgaatacttataaactgttgttcctggaagttatttattccataaaaaatttgttcttttgtcatgaatttataattcctaaatgaagaccagaaagtacaaattgctgggaggaagaataggctttattaatcaactgatgtcttgatttttctaaatgggaagattgctttatttttaacactaattatgggagcagattcttagcaaacttctttggaaaagttaatgttatgatgtgcattaggctgccccatcgtgtatataaatgaagcagatttgatttttgtattcttacgtttctctgctttgtagttgtggctgtacttaaagaaatacagaatttcatatatttaaaaatgtttaaaatgtgacccacagaacattgtaaatgattaaaaactaacatgaaaatattacaacctaaaagaattcttaacttcacaagtgttttacttcgacgatgtgcctttgatttaatttgggacacttttttagaaggatacattattcgtgtttgcaacggtctttgaagagcttggaaataaaatttctgcttaattaatcaaaaaaaaaaaaaaaaaaaaaaa

SEQ ID NO: 429 - protein, 153 aa, Homo sapiens
MGAPLLSPGWGAGAAGRRWWMLLAPLLPALLLVRPAGALVEGLYCGTRDCYEVLGVSRSAGKAEIARAYRQLARRYHPDRYRPQPGDEGPGRTPQSAEEAFLLVATAYETLKVSQAAAELQQYCMQNACKDALLVGVPAGSNPFREPRSCALL

SEQ ID NO: 430 - DNA, 2787 bp, Homo sapiens
agagcggaggccgcactccagcactgcgcagggaccgccttggaccgcagttgccggccaggaatcccagtgtcacggtggacacgcctccctcgcgcccttgccgcccacctgctcacccagctcaggggctttggaattctgtggccacactgcgaggagatcggttctgggtcggaggctacaggaagactcccactccctgaaatctggagtgaagaacgccgccatccagccaccattccaaggaggtgcaggagaacagctctgtgataccatttaacttgttgacattacttttatttgaaggaacgtatattagagcttactttgcaaagaaggaagatggttgtttccgaagtggacatcgcaaaagctgatccagctgctgcatcccaccctctattactgaatggagatgctactgtggcccagaaaaatccaggctcggtggctgagaacaacctgtgcagccagtatgaggagaaggtgcgcccctgcatcgacctcattgactccctgcgggctctaggtgtggagcaggacctggccctgccagccatcgccgtcatcggggaccagagctcgggcaagagctccgtgttggaggcactgtcaggagttgcccttcccagaggcagcgggatcgtgaccagatgcccgctggtgctgaaactgaagaaacttgtgaacgaagataagtggagaggcaaggtcagttaccaggactacgagattgagatttcggatgcttcagaggtagaaaaggaaattaataaagcccagaatgccatcgccggggaaggaatgggaatcagtcatgagctaatcaccctggagatcagctcccgagatgtcccggatctgactctaatagaccttcctggcataaccagagtggctgtgggcaatcagcctgctgacattgggtataagatcaagacactcatcaagaagtacatccagaggcaggagacaatcagcctggtggtggtccccagtaatgtggacatcgccaccacagaggctctcagcatggcccaggaggtggaccccgagggagacaggaccatcggaatcttgacgaagcctgatctggtggacaaaggaactgaagacaaggttgtggacgtggtgcggaacctcgtgttccacctgaagaagggttacatgattgtcaagtgccggggccagcaggagatccaggaccagctgagcctgtccgaagccctgcagagagagaagatcttctttgagaaccacccatatttcagggatctgctggaggaaggaaaggccacggttccctgcctggcagaaaaacttaccagcgagctcatcacacatatctgtaaatctctgcccctgttagaaaatcaaatcaaggagactcaccagagaataacagaggagctacaaaagtatggtgtcgacataccggaagacgaaaatgaaaaaatgttcttcctgatagataaaattaatgcctttaatcaggacatcactgctctcatgcaaggagaggaaactgtaggggaggaagacattcggctgtttaccagactccgacacgagttccacaaatggagtacaataattgaaaacaattttcaagaaggccataaaattttgagtagaaaaatccagaaatttgaaaatcagtatcgtggtagagagctgccaggctttgtgaattacaggacatttgagacaatcgtgaaacagcaaatcaaggcactggaagagccggctgtggatatgctacacaccgtgacggatatggtccggcttgctttcacagatgtttcgataaaaaattttgaagagttttttaacctccacagaaccgccaagtccaaaattgaagacattagagcagaacaagagagagaaggtgagaagctgatccgcctccacttccagatggaacagattgtctactgccaggaccaggtatacaggggtgcattgcagaaggtcagagagaaggagctggaagaagaaaagaagaagaaatcctgggattttggggctttccagtccagctcggcaacagactcttccatggaggagatctttcagcacctgatggcctatcaccaggaggccagcaagcgcatctccagccacatccctttgatcatccagttcttcatgctccagacgtacggccagcagcttcagaaggccatgctgcagctcctgcaggacaaggacacctacagctggctcctgaaggagcggagcgacaccagcgacaagcggaagttcctgaaggagcggcttgcacggctgacgcaggctcggcgccggcttgcccagttccccggttaaccacactctgtccagccccgtagacgtgcacgcacactgtctgcccccgttcccgggtagccactggactgacgacttgagtgctcagtagtcagactggatagtccgtctctgcttatccgttagccgtggtgatttagcaggaagctgtgagagcagtttggtttctagcatgaagacagagccccaccctcagatgcacatgagctggcgggattgaaggatgctgtcttcgtactgggaaagggattttcagccctcagaatcgctccaccttgcagctctccccttctctgtattcctagaaactgacacatgctgaacatcacagcttatttcctcatttttataatgtcccttcacaaacccagtgttttaggagcatgagtgccgtgtgtgtgcgtcctgtcggagccctgtctcctctctctgtaataaactcatttctagcag

SEQ ID NO: 431 - protein, 662 aa, Homo sapiens
MVVSEVDIAKADPAAASHPLLLNGDATVAQKNPGSVAENNLCSQYEEKVRPCIDLIDSLRALGVEQDLALPAIAVIGDQSSGKSSVLEALSGVALPRGSGIVTRCPLVLKLKKLVNEDKWRGKVSYQDYEIEISDASEVEKEINKAQNAIAGEGMGISHELITLEISSRDVPDLTLIDLPGITRVAVGNQPADIGYKIKTLIKKYIQRQETISLVVVPSNVDIATTEALSMAQEVDPEGDRTIGILTKPDLVDKGTEDKVVDVVRNLVFHLKKGYMIVKCRGQQEIQDQLSLSEALQREKIFFENHPYFRDLLEEGKATVPCLAEKLTSELITHICKSLPLLENQIKETHQRITEELQKYGVDIPEDENEKMFFLIDKINAFNQDITALMQGEETVGEEDIRLFTRLRHEFHKWSTIIENNFQEGHKILSRKIQKFENQYRGRELPGFVNYRTFETIVKQQIKALEEPAVDMLHTVTDMVRLAFTDVSIKNFEEFFNLHRTAKSKIEDIRAEQEREGEKLIRLHFQMEQIVYCQDQVYRGALQKVREKELEEEKKKKSWDFGAFQSSSATDSSMEEIFQHLMAYHQEASKRISSHIPLIIQFFMLQTYGQQLQKAMLQLLQDKDTYSWLLKERSDTSDKRKFLKERLARLTQARRRLAQFPG

SEQ ID NO: 432 - DNA, 2461 bp, Homo sapiens
ccgcagccgccgccgccgccgccgccgcgatgtgaccttcagggccgccaggacgggatgaccggagcctccgccccgcggcgcccgctcgcctcggcctcccgggcgctctgaccgcgcgtccccggcccgccatggccccttcgctctcgcccgggcccgccgccctgcgccgcgcgccgcagctgctgctgctgctgctggccgcggagtgcgcgcttgccgcgctgttgccggcgcgcgaggccacgcagttcctgcggcccaggcagcgccgcgcctttcaggtcttcgaggaggccaagcagggccacctggagagggagtgcgtggaggagctgtgcagccgcgaggaggcgcgggaggtgttcgagaacgaccccgagacggattatttttacccaagatacttagactgcatcaacaagtatgggtctccgtacaccaaaaactcaggcttcgccacctgcgtgcaaaacctgcctgaccagtgcacgcccaacccctgcgataggaaggggacccaagcctgccaggacctcatgggcaacttcttctgcctgtgtaaagctggctgggggggccggctctgcgacaaagatgtcaacgaatgcagccaggagaacgggggctgcctccagatctgccacaacaagccgggtagcttccactgttcctgccacagcggcttcgagctctcctctgatggcaggacctgccaagacatagacgagtgcgcagactcggaggcctgcggggaggcgcgctgcaagaacctgcccggctcctactcctgcctctgtgacgagggctttgcgtacagctcccaggagaaggcttgccgagatgtggacgagtgtctgcagggccgctgtgagcaggtctgcgtgaactccccagggagctacacctgccactgtgacgggcgtgggggcctcaagctgtcccaggacatggacacctgtgaggacatcttgccgtgcgtgcccttcagcgtggccaagagtgtgaagtccttgtacctgggccggatgttcagtgggacccccgtgatccgactgcgcttcaagaggctgcagcccaccaggctggtagctgagtttgacttccggacctttgaccccgagggcatcctcctctttgccggaggccaccaggacagcacctggatcgtgctggccctgagagccggccggctggagctgcagctgcgctacaacggtgtcggccgtgtcaccagcagcggcccggtcatcaaccatggcatgtggcagacaatctctgttgaggagctggcgcggaatctggtcatcaaggtcaacagggatgctgtcatgaaaatcgcggtggccggggacttgttccaaccggagcgaggactgtatcatctgaacctgaccgtgggaggtattcccttccatgagaaggacctcgtgcagcctataaaccctcgtctggatggctgcatgaggagctggaactggctgaacggagaagacaccaccatccaggaaacggtgaaagtgaacacgaggatgcagtgcttctcggtgacggagagaggctctttctaccccgggagcggcttcgccttctacagcctggactacatgcggacccctctggacgtcgggactgaatcaacctgggaagtagaagtcgtggctcacatccgcccagccgcagacacaggcgtgctgtttgcgctctgggcccccgacctccgtgccgtgcctctctctgtggcactggtagactatcactccacgaagaaactcaagaagcagctggtggtcctggccgtggagcatacggccttggccctaatggagatcaaggtctgcgacggccaagagcacgtggtcaccgtctcgctgagggacggtgaggccaccctggaggtggacggcaccaggggccagagcgaggtgagcgccgcgcagctgcaggagaggctggccgtgctcgagaggcacctgcggagccccgtgctcacctttgctggcggcctgccagatgtgccggtgacttcagcgccagtcaccgcgttctaccgcggctgcatgacactggaggtcaaccggaggctgctggacctggacgaggcggcgtacaagcacagcgacatcacggcccactcctgcccccccgtggagcccgccgcagcctaggcccccacgggacgcggcaggcttctcagtctctgtccgagacagccgggaggagcctgggggctcctcaccacgtggggccatgctgagagctgggctttcctctgtgaccatcccggcctgtaacatatctgtaaatagtgagatggacttggggcctctgacgccgcgcactcagccgtgggcccgggcgcggggaggccggcgcagcgcagagcgggctcgaagaaaataattctctattatttttattaccaagcgcttctttctgactctaaaatatggaaaat

SEQ ID NO: 433 - protein, 678 aa, Homo sapiens
MAPSLSPGPAALRRAPQLLLLLLAAECALAALLPAREATQFLRPRQRRAFQVFEEAKQGHLERECVEELCSREEAREVFENDPETDYFYPRYLDCINKYGSPYTKNSGFATCVQNLPDQCTPNPCDRKGTQACQDLMGNFFCLCKAGWGGRLCDKDVNECSQENGGCLQICHNKPGSFHCSCHSGFELSSDGRTCQDIDECADSEACGEARCKNLPGSYSCLCDEGFAYSSQEKACRDVDECLQGRCEQVCVNSPGSYTCHCDGRGGLKLSQDMDTCEDILPCVPFSVAKSVKSLYLGRMFSGTPVIRLRFKRLQPTRLVAEFDFRTFDPEGILLFAGGHQDSTWIVLALRAGRLELQLRYNGVGRVTSSGPVINHGMWQTISVEELARNLVIKVNRDAVMKIAVAGDLFQPERGLYHLNLTVGGIPFHEKDLVQPINPRLDGCMRSWNWLNGEDTTIQETVKVNTRMQCFSVTERGSFYPGSGFAFYSLDYMRTPLDVGTESTWEVEVVAHIRPAADTGVLFALWAPDLRAVPLSVALVDYHSTKKLKKQLVVLAVEHTALALMEIKVCDGQEHVVTVSLRDGEATLEVDGTRGQSEVSAAQLQERLAVLERHLRSPVLTFAGGLPDVPVTSAPVTAFYRGCMTLEVNRRLLDLDEAAYKHSDITAHSCPPVEPAAA

SEQ ID NO: 434 - DNA, 2906 bp, Homo sapiens
cggtggtatcggcggcagctgtgagggggttccgggaagatggtgctgatcaaggaattccgtgtggttttgccatgttctgttcaggagtatcaggttgggcagctttactctgttgcagaagctagtaagaatgagactggtggtggagaaggaattgaagtcttaaagaatgaaccttatgagaaggatggagaaaagggacagtatacgcacaaaatttatcacctaaagagcaaagtgcctgcattcgtgaggatgattgctcccgagggctccttggtgtttcatgagaaagcctggaatgcgtacccctactgtagaacaattgtaacgaatgaatatatgaaagatgatttcttcattaaaatcgaaacatggcacaaaccagacttgggaacattagaaaatgtacatggtttagatccaaacacatggaaaactgttgaaattgtccatatagatattgcagatagaagtcaagttgaaccagcagactacaaagctgatgaagacccagcattattccagtcagtcaagaccaagagaggccctttgggacccaactggaagaaggagctggcaaacagccctgactgtccccagatgtgtgcctataagctggtgaccatcaaattcaagtggtggggactgcaaagcaaagtagaaaacttcattcaaaagcaagaaaaacggatatttacaaacttccatcgccagcttttttgttggattgacaagtggatcgatctcacgatggaagacattaggagaatggaagacgagactcagaaagaactagaaacaatgcgtaagaggggttccgttcgaggcacgtcggctgctgatgtctagatgagtcccctgtagggtcagagacaatgtcaaactgtttacgtaatcaaggtcaagtgaggggaacaagcgcagccagtgatgagtgaagaagaatctgaccagtatcttgcagtgttgacgtttcccagatgtgtgcttgtgatgatacacacacatgcacaggttctcaaccacgtgtgtatatatgtatgtgtgcatatgtctgtagctgtatataaagcgcatgtagagctacagatccagatacacacacttgtgtatatatgtacatacagacatactgaagggattagtacaatttctccaaagtactgtacctatcttcagcaagaatgcaaaagaaaatattttcaatatatatacctggaacagattttaataattatcagagtaataccattaatggacaaattgactgcaatgtaatactagctggtatgtttcataaatgtcaagctgtggaccaacatatatagccttttattatttttctcttcttttaagtcagtctgttataaatttttttttagtcccataagcagtagactcccacagaaaatttcttcaaaattttttggtgttccaatgaatctgggatgtaaactctgaatgtatttataactatttatttctggatggtcattatcttgtagccaaatttgacaatataaagtaaggagcaaagttacaggccagtttttacttgtttgccctgagggaaaaatccttttaaaaaaaatttctggtttttattggatttttgtattttaaatttcaaatatttttctacatcaaacctagcaaaaatggagatgacggtttctgatttataataaatactagacagttttcaggctcctgttagacaaacacattgatgaagaaattagtcttaataggattgtaggctgtgtagaaaagttggaaatatagcacttcatggagtcttgttttgaagatgacagttttctgtaactacagcttggaaactatgcaaatggtctagattcctcagagctcacatgataggatatagttagtgatgacattttgctcttcttgtgggaacacacacttcaaggaggagatagtgactttgagataggaacagtttaagatgcagtgtgagtctggcctgcgtgcggtgaggaggccccgccaagagactggtggacatctgactgtgggatgtgctctcaagtaggacgtcatcaggacagattctgaataggcatcatgagagtgctggtcagaaacggctgccactttttttaatttaattttattttttatttaaaggaaggaacaatagctaggtaagatttttatcagctttctctgtctgaatccagtttttcctctgtcagtcctggaagcttgaatagaattatattgttgaagccttcaggtcacaaactgtcttttgtaacctcctgtccctcctaaaacacgccaacccctgcagtcaaatcacattagtaatctgatttgctgacagtcctgccctgcctgctcctcgttttcccacatgtcctgcatccctcccccactggagtgatttcagtgaatcagacaaggaaggatgtgtaggatcactactgcattgcaataccctgttatcctcagcaacaaaacccacatttcatacatcctttgtgtactcaggataaagactgatgtttactctctgggcactgttgtaagataggttttgtcagagcataatcattgtctgcaaagtgtttggtgcgaggaagattattgctaattttgtgaaataaagagtctagccctctccttttaatgaacttaactctcgctggcatctgtagtatcattgggagcttaggcgcacatggaaatgagagcccggcgcatggattttaatgtttttctaacaactgtggagatttgagggaatgtgtggtgaatgtaaaatacctagtttacttgccagtctcttgtgtaaattacagtaaaacaaagtaaatgaaatttaaacaaaaaataaatttgatcacaaaatgaaaaaaaaaaaaaaaaaaaaa

SEQ ID NO: 435 - protein, 271 aa, Homo sapiens
MVLIKEFRVVLPCSVQEYQVGQLYSVAEASKNETGGGEGIEVLKNEPYEKDGEKGQYTHKIYHLKSKVPAFVRMIAPEGSLVFHEKAWNAYPYCRTIVTNEYMKDDFFIKIETWHKPDLGTLENVHGLDPNTWKTVEIVHIDIADRSQVEPADYKADEDPALFQSVKTKRGPLGPNWKKELANSPDCPQMCAYKLVTIKFKWWGLQSKVENFIQKQEKRIFTNFHRQLFCWIDKWIDLTMEDIRRMEDETQKELETMRKRGSVRGTSAADV

SEQ ID NO: 436 - DNA, 8743 bp, Homo sapiens
cagacggaagccgaacgagttcctcggcggctgcaggatgggggactccaaagtgaaagtggcggtgcggatacgacccatgaaccggcgagagactgacttgcataccaaatgtgtggtggatgtggatgcaaacaaggttattcttaatcctgtaaatacgaatctttccaaaggagatgcccggggccagccgaagtgttttgcttatgatcattgtttctggtctatggatgaatctgtcaaagaaaagtatgcaggtcaagatattgttttcaagtgccttggagagaatatcctgcagaatgcttttgatggctacaatgcatgtatctttgcctatggacagactggctctggaaaatcttataccatgatgggcacagctgaccaacctggattaatcccaagactttgcagtggactctttgaacgaactcagaaagaggaaaatgaagaacagagttttaaagtagaagtgtcctacatggaaatttataatgaaaaagttcgagaccttcttgatcccaaaggaagccgtcagacgttgaaagtcagagagcatagtgtgttgggaccttatgtcgacggactttctaaactggctgccacaagctacaaggatattgagtcgttgatgtctgagggtaacaaatctcgcactgttgctgcaaccaacatgaacgaggagagtagccgatcccatgcagttctcaaaatcaccctcacacatactctctacgatgcgaagtctgggacatctggagagaaagtgggcaaactcagcctggtggatttagctggcagtgaacgagcaacgaagacaggcgctgcaggggacaggctgaaggaagggagcaacattaacgagtccctcacaaccctcggtctggttatctcagctcttgcagatcagagtgctggcaaaaacaagaataaatttgttccatatcgtgactcagttctcacctggctgctcaaagacagcctcgggggtaacagcaagaccgccatggtggctactgtgagtcctgcagctgataactatgatgaaaccctctcaactctgcggtatgcagatcgagccaagcacattgtaaacaacgctgtggtgaatgaggaccctaatgcccgaattatccgggacctccgggaagaagttgagaaactccgggagcagctgaccaaagcagaggcaatgaaatctccagagctaaaggaccggctggaagaatctgagaagctaatccaggaaatgactgtgacctgggaggagaaattaaggaaaacggaggagattgcacaggaacgacagaaacagcttgagagtcttggaatatctcttcagtcttcgggaatcaaagttggggatgataaatgcttccttgtgaatctgaatgctgacccagctctgaatgagcttctggtgtactatttaaaggaacatacattgatagggtcagcaaattcccaagatatccaactgtgcggcatgggaattcttcctgaacactgtattatagacatcacgtcagaaggccaggttatgctgactcctcagaagaacaccagaacatttgtaaatgggtcatctgtctccagtccaatacagctacaccatggggacaggatattatggggaaacaatcatttcttcagactcaatttgcctaaaaagaaaaagaaagcagaacgagaggatgaggaccaggatccctccatgaagaacgagaatagttctgagcagctggatgtagacggagactcctccagcgaggtgtccagtgaagttaactttaattacgaatacgcacagatggaggtcaccatgaaggccctgggcagcaatgatccgatgcagtccatattaaacagcctagaacaacagcatgaagaagaaaaacgatctgcactggagcgccagaggcttatgtatgagcacgaattggagcagctccggagaaggctgtctcctgagaagcagaactgccggagcatggacaggttttctttccactcgcccagcgctcagcaacgcttaagacagtgggctgaggagagagaagcaacgttgaataacagcctgatgaggctgagggaacaaattgttaaggccaatctattggtgagagaagctaattacattgctgaggagctggataaaagaacagaatacaaagttaccctacagattccagcctccagcctggatgccaacaggaagcgaggctctcttcttagtgagcctgcaatccaggtgagaagaaaaggaaaaggaaagcagatttggtctttggaaaaactggacaacaggctgttggatatgagagacctttatcaggagtggaaagagtgtgaagaagataacccagtaatacgatcatacttcaaacgtgctgatccattctatgatgagcaggaaaatctcagtctcattggggtggccaatgtcttcctcgagtcacttttctatgatgtgaagttacaatacgctgttcccatcatcaaccagaaaggagaggtggcaggtcggctgcacgtggaggtgatgcgactcagtggtgatgttggggagaggatcgcaggaggcgatgaggtggcagaggtcccctttgagaaggagacccaggagaacaaactggtgtgcatggttaaaatcctgcaagctactgggttgccacagcatctgtcccactttgtgttctgcaaatacagcttctgggatcaacaggagccggtgattgtcgctcctgaagtggacacctcctcctcttccgtcagcaaggagccgcactgcatggttgtctttgatcattgcaatgagttttctgttaacatcaccgaagactttatcgagcatctttccgaaggagcattggcaattgaagtatatggacataaaataaacgatccccggaaaaaccccgccctgtgggatttgggaatcatccaagcaaagacacgtagtcttcgggacagatggagtgaagtgaccaggaaattggaattctgggttcaaatcttggaacagaatgagaatggtgaatactgccctgtagaagtgatttctgcaaaggatgtcccaacaggaggaatcttccagctccggcaggggcagtcccggagagttcaagtcgaagtgaagtcagtgcaggaatctgggactttaccactgatggaagaatgtatactgtctgttggcattggatgtgtcaaagttagaccgctcagagcccccagaacacatgagaccttccatgaggaagaggaagacatggacagctaccaggatcgagatttagagagacttcgtagaaaatggctaaatgcattaacaaaacgtcaggagtacttggatcaacaattgcaaaagcttgtcagtaaacgtgataaaacagaggatgatgctgaccgtgaagcgcagcttctggagatgcggttgaccctaactgaggagaggaacgcggtgatggtcccctctgctggcagtggtattccaggggccccagcagaatggaccccagtacctgggatggagacacacattcctgttatattcctggacttaaatgctgatgatttcagctctcaggataatcttgatgacccagaagctggtggatgggatgcgaccttgactggggaagaagaagaggagttctttgaattgcagattgtgaagcagcatgatggggaggtgaaagcagaagcctcctgggactccgcggtgcatggctgccctcagctcagcaggggcacgcccgtggacgagcggttgttcctgatcgtgcgcgtgacggtccagctcagccaccctgctgacatgcaactggtgttacgcaagagaatctgtgtcaatgttcacggccgccagggttttgcacagagtctcctaaaaaagatgtctcatcgaagttctattcctggctgtggagtgacttttgaaattgtctccaatattccagaggatgcccagggagtggaagaacgggaagcattagcaagaatggcagccaatgttgaaaacccagcttctgctgactcggaggcttatattgaaaagtacctcaggagcgtgctggctgtagaaaacctcctgactttagatcgtctgcgccaggaagttgcagtgaaggaacagttaacaggaaaaggaaagttgagcaggaggagtatcagttctccaaatgtgaacagattgtctggaagccgacaagatctcattccatcatacagtctaggcagcaacaagggccggtgggaaagtcagcaggatgtatcccaaaccacagtttccagaggaatagctcctgcccccgccctctctgtttctccccaaaataaccattctccagatccaggactcagtaaccttgcagcatcctacttgaatcctgtcaaatccttcgtgccgcaaatgccaaagctcctcaagtctctctttcccgtccgcgatgagaagaggggcaagcggccgtctcccctcgcacaccagcccgtgccccgcatcatggtgcagtcagccagcccggacatcagggtgaccaggatggaggaggctcagccggagatgggccctgacgtgctggtgcagacgatgggggccccggccttgaagatctgcgacaaacctgccaaagtgccttccccaccgcctgtcatagctgtcacagcggtcaccccggctccggaggcacaggacgggccccccagccccctgagtgaagcctctagcgggtacttctcccacagcgtctccaccgcgaccctgtcggacgccctgggccccggcctggacgctgcggccccgccggggtccatgcccaccgcccctgaggccgagcccgaggcgcccatcagccaccccccaccgcccacggccgtccccgccgaggagccccctggcccccagcagctcgtgagccccggtcgggagcgccccgacctcgaggccccggcgcccggctccccgttccgcgtccggagggtgcgggcctcggagttgcgctccttctcgcgcatgctggctggggaccccggctgctccccgggggccgaggggaatgcgccggccccgggcgccgggggacaggccctggcctctgattccgaggaagctgacgaggtcccggagtggctccgagagggcgagttcgtcaccgtgggcgcccacaaaacgggcgtggtgagatacgtggggcctgccgacttccaagagggcacgtgggtcggcgtggagctcgacctgccctcaggtaagaatgacggttccatcggcgggaagcagtacttcaggtgtaaccctggctacgggctgctggtcaggcccagccgggtccgcagggccacgggccctgtgcggcggcgcagcacaggactccggctgggtgcccccgaggcccgccggagcgccaccctctcgggctccgccaccaacctggcctcgctgacagctgccctggccaaggccgacaggagccacaagaaccctgagaaccggaaatcctgggccagctgagccgctgccttagggcgaacttttctgggggtgcccggccccttttgagccctgccagtgacagccctgaggagccaggagcccggtggccccttccccaggggcagggcgatgaatgctttttgcacgacacagggctggtgacctccctgggcctctggaagctttgtttcttctgtacccgggtaaagtgggggcctcaactgtgcctcctccggtggatggaaggttctgggtgcccgcaggggctgggggatgctaggactgagaccctgggtggtgcagcgcctggtgatcttgctgtgtgcctgtgcctggggccttatgttgctctttctatcatttccattctggtggccccactaatgtcttaacctaaaccataattgtaaccagtgcctttcctccccactggagggcaagcccccccacccacccaggatgtcctggctcactccgcaagccccccagcctcccaccctggtcccagtttcccgcaaagtgcctctgggggaccccccagcctcccaccctggtcccaggttccacaagtgcctctggagggccctgggctctggcagatggtcctggtgccccagacgggggccgagggcctgagcccccccatccctcctctgccagggtttcttagcggtttctctgtggatgttttggcatctttagacacctggaaagtctcttatgtttgccgtttattcccttcacagaaggcttggaatgtatttatttatatttattttttcaaaatccgaaatcatttgcgagccgcaatcgtcgtctgcctgtgtgggggggcccagggcctgccttgcacgttgcagcctctctggccattgcagagctgctggcctcctgcccaggtggagggtcctggggacggcagaggataaagccccctcctcacatccctctattgcggatccacagtggccttactcttaacttggatgagagcaaaaacctgggagaatgatgtgcttctgtagtcggtgacaaaggaagaggcattgctactttatttggtgcacttttggtttctaggaaggtctttgggtcattttaacttctcggcaactcccagactctcagagtgtggggctggggcctggcggctgggctggtgcagggagtgtgctggttagtctccagaccctcacagcagccacgcccccaggcccaccgtgcatggtgtgggcgggacagccggaagcttccggggtggcctccacctcctggctggggcacttatgctcccagagcctttggtgccaggtttgtgggatgggggttagcgtctatgtgtggaaggccaccaatctagggacaggagtcctgggtcaagattcacacagccacccttggagctggtttctagttctcacatttagtcaacatctagaaagcgctgcggaaggctctggttctctagggacttgaaggcgccaacagagtagtctccatggtgggcctgtcccagccctggctgcgaggacaggttgtctttctctccccagttggcgagggacacgaaggctgcggccgggctggcagagggcccggcccctggggggaggcactcctccagggctctccctgtccttagccgattttgagggaaccctgtggcacctgtccctggatgaagagctgtcacctctgccttgccctttaactcaacccgcttcccagcacagcggctttctttttaaaacctgtttcactgagaagtttgtttttgggtccgctggtgtcactatggcctgggtgagaggccagcactgctgctgccctgaggggaaacgcctgggccgtgtagtggggacgctctgggaatggtggcggacgggcagcgtgggtgggacctggcacttcgtggtggctgagccatccacccagcagcggcctcctgtagcaccatattgggaaagtcctgggggacgtgtgtgtcgtgctttttaccatcggtttgacttacagtggagtagaacgagccagagttcctgacttgagcaggtggatttgggcccaggccctgttcactcttgcttctcggtgcggactaatgtcagcttgtggctgggaaagagggatgtgcagtgacgtggtcaccaaggcagtgagccccgctgaccccgggccagcacttggcaggcaggaggtgcggtctccagagtggtgggccagggcgggctggcctccgtcttctatcttcttttcttgcctccctgaccagcagactcacctcccaagaacgcctgcccgcccacccgccttaggactcccgatgcgctcctggaaggccccaggagtggcaccttagtgtgggtcggcccgcagatggcacccaaggccgggaagggcagtaactgcacacgcggcgctgtcagagatgggggtgggggatgcttctgggggccctgcctccccattgtgtgcccagaacatccctggccccaccccgccacttccctcgggcccttatgaaggactgaggctccagggtgagaaggctcacttctgccccaggcactgcgtccagcagcagaggggacagggggcaggtgtgtgactgggttcctgggtacccaggcctgaccagagggagcgggagggcagaggtgaggagggggaagatgtttctgggcctaccaaggttcaacaagagaacggagctgggaatgtgactgctggagcctgagaggtggaggagttctgatcccccgttacttcctagcattttctcctcttgccttaaaagttccctgtatgtgaaacgggaagtcctgagagtgtgtgttggtggctgtgcgcacgcacacaagacgggagtcaccctgtgcttcctgcccaagatactgacccattgaacccccaaagcatctttctctccacaaagtccgtggtgccttcctggtgggctgcagacactaatggtgttggggggtcttggaacagcttctctatgtgtggattcgtgtaaatgcgaagagttcacatataaagaagtgactttgattctgtgattatattgatttggtacacagtaaatgggagtttaaaaaatccaaagactctaatgacttgtaaagactctaatgatttgtatcatgtaatgaactaaaccacctgtaattttgtaccatatgtgtctttccatcaaatgaccaacagcttctcaataaaaccagaccatttctcacctgc

SEQ ID NO: 437 - protein, 1826 aa, Homo sapiens
MGDSKVKVAVRIRPMNRRETDLHTKCVVDVDANKVILNPVNTNLSKGDARGQPKCFAYDHCFWSMDESVKEKYAGQDIVFKCLGENILQNAFDGYNACIFAYGQTGSGKSYTMMGTADQPGLIPRLCSGLFERTQKEENEEQSFKVEVSYMEIYNEKVRDLLDPKGSRQTLKVREHSVLGPYVDGLSKLAATSYKDIESLMSEGNKSRTVAATNMNEESSRSHAVLKITLTHTLYDAKSGTSGEKVGKLSLVDLAGSERATKTGAAGDRLKEGSNINESLTTLGLVISALADQSAGKNKNKFVPYRDSVLTWLLKDSLGGNSKTAMVATVSPAADNYDETLSTLRYADRAKHIVNNAVVNEDPNARIIRDLREEVEKLREQLTKAEAMKSPELKDRLEESEKLIQEMTVTWEEKLRKTEEIAQERQKQLESLGISLQSSGIKVGDDKCFLVNLNADPALNELLVYYLKEHTLIGSANSQDIQLCGMGILPEHCIIDITSEGQVMLTPQKNTRTFVNGSSVSSPIQLHHGDRILWGNNHFFRLNLPKKKKKAEREDEDQDPSMKNENSSEQLDVDGDSSSEVSSEVNFNYEYAQMEVTMKALGSNDPMQSILNSLEQQHEEEKRSALERQRLMYEHELEQLRRRLSPEKQNCRSMDRFSFHSPSAQQRLRQWAEEREATLNNSLMRLREQIVKANLLVREANYIAEELDKRTEYKVTLQIPASSLDANRKRGSLLSEPAIQVRRKGKGKQIWSLEKLDNRLLDMRDLYQEWKECEEDNPVIRSYFKRADPFYDEQENLSLIGVANVFLESLFYDVKLQYAVPIINQKGEVAGRLHVEVMRLSGDVGERIAGGDEVAEVPFEKETQENKLVCMVKILQATGLPQHLSHFVFCKYSFWDQQEPVIVAPEVDTSSSSVSKEPHCMVVFDHCNEFSVNITEDFIEHLSEGALAIEVYGHKINDPRKNPALWDLGIIQAKTRSLRDRWSEVTRKLEFWVQILEQNENGEYCPVEVISAKDVPTGGIFQLRQGQSRRVQVEVKSVQESGTLPLMEECILSVGIGCVKVRPLRAPRTHETFHEEEEDMDSYQDRDLERLRRKWLNALTKRQEYLDQQLQKLVSKRDKTEDDADREAQLLEMRLTLTEERNAVMVPSAGSGIPGAPAEWTPVPGMETHIPVIFLDLNADDFSSQDNLDDPEAGGWDATLTGEEEEEFFELQIVKQHDGEVKAEASWDSAVHGCPQLSRGTPVDERLFLIVRVTVQLSHPADMQLVLRKRICVNVHGRQGFAQSLLKKMSHRSSIPGCGVTFEIVSNIPEDAQGVEEREALARMAANVENPASADSEAYIEKYLRSVLAVENLLTLDRLRQEVAVKEQLTGKGKLSRRSISSPNVNRLSGSRQDLIPSYSLGSNKGRWESQQDVSQTTVSRGIAPAPALSVSPQNNHSPDPGLSNLAASYLNPVKSFVPQMPKLLKSLFPVRDEKRGKRPSPLAHQPVPRIMVQSASPDIRVTRMEEAQPEMGPDVLVQTMGAPALKICDKPAKVPSPPPVIAVTAVTPAPEAQDGPPSPLSEASSGYFSHSVSTATLSDALGPGLDAAAPPGSMPTAPEAEPEAPISHPPPPTAVPAEEPPGPQQLVSPGRERPDLEAPAPGSPFRVRRVRASELRSFSRMLAGDPGCSPGAEGNAPAPGAGGQALASDSEEADEVPEWLREGEFVTVGAHKTGVVRYVGPADFQEGTWVGVELDLPSGKNDGSIGGKQYFRCNPGYGLLVRPSRVRRATGPVRRRSTGLRLGAPEARRSATLSGSATNLASLTAALAKADRSHKNPENRKSWAS

SEQ ID NO: 438 - DNA, 4298 bp, Homo sapiens
cagacaggatattcactgctgtggcaaggcctgtagagagtttcgaagttaggaggactcaagacggtccctccctggacttttctgaaggggctcaaaagatgacacgcgccagagctggaaggcgtcgccaattggtccaacttttccctcctccctttttgcggatgagaaaaactgaggcccaggtttgggatttccagagcccgggatttcccggcaacgccgacaaccacattcccccggctattctgacccgccccggttccgggacgctccctgggagccgccgccgagggcctgctgggactcccggggaccccgccgtcggggcagcccccacgcccggcgccgcccgccggaacggcgccgctgttgcgcacttgcaggggagccggcgactgagggcgaggcagggagggagcaagcggggctgggagggctgctggcgcgggctcgccggctgtgtatggtctatcgcaggcagctgacctttgaggaggaaatcgctgctctccgctccttcctgtagtaacagccgccgctgccgccgccgccaggaaccccggccgggagcgagagccgcggggcgcagagccggcccggctgccggacggtgcggccccaccaggtgaacggccatggcgggctggatccaggcccagcagctgcagggagacgcgctgcgccagatgcaggtgctgtacggccagcacttccccatcgaggtccggcactacttggcccagtggattgagagccagccatgggatgccattgacttggacaatccccaggacagagcccaagccacccagctcctggagggcctggtgcaggagctgcagaagaaggcggagcaccaggtgggggaagatgggtttttactgaagatcaagctggggcactacgccacgcagctccagaaaacatatgaccgctgccccctggagctggtccgctgcatccggcacattctgtacaatgaacagaggctggtccgagaagccaacaattgcagctctccggctgggatcctggttgacgccatgtcccagaagcaccttcagatcaaccagacatttgaggagctgcgactggtcacgcaggacacagagaatgagctgaagaaactgcagcagactcaggagtacttcatcatccagtaccaggagagcctgaggatccaagctcagtttgcccagctggcccagctgagcccccaggagcgtctgagccgggagacggccctccagcagaagcaggtgtctctggaggcctggttgcagcgtgaggcacagacactgcagcagtaccgcgtggagctggccgagaagcaccagaagaccctgcagctgctgcggaagcagcagaccatcatcctggatgacgagctgatccagtggaagcggcggcagcagctggccgggaacggcgggccccccgagggcagcctggacgtgctacagtcctggtgtgagaagttggccgagatcatctggcagaaccggcagcagatccgcagggctgagcacctctgccagcagctgcccatccccggcccagtggaggagatgctggccgaggtcaacgccaccatcacggacattatctcagccctggtgaccagcacattcatcattgagaagcagcctcctcaggtcctgaagacccagaccaagtttgcagccaccgtacgcctgctggtgggcgggaagctgaacgtgcacatgaatcccccccaggtgaaggccaccatcatcagtgagcagcaggccaagtctctgcttaaaaatgagaacacccgcaacgagtgcagtggtgagatcctgaacaactgctgcgtgatggagtaccaccaagccacgggcaccctcagtgcccacttcaggaacatgtcactgaagaggatcaagcgtgctgaccggcggggtgcagagtccgtgacagaggagaagttcacagtcctgtttgagtctcagttcagtgttggcagcaatgagcttgtgttccaggtgaagactctgtccctacctgtggttgtcatcgtccacggcagccaggaccacaatgccacggctactgtgctgtgggacaatgcctttgctgagccgggcagggtgccatttgccgtgcctgacaaagtgctgtggccgcagctgtgtgaggcgctcaacatgaaattcaaggccgaagtgcagagcaaccggggcctgaccaaggagaacctcgtgttcctggcgcagaaactgttcaacaacagcagcagccacctggaggactacagtggcctgtccgtgtcctggtcccagttcaacagggagaacttgccgggctggaactacaccttctggcagtggtttgacggggtgatggaggtgttgaagaagcaccacaagccccactggaatgatggggccatcctaggttttgtgaataagcaacaggcccacgacctgctcatcaacaagcccgacgggaccttcttgttgcgctttagtgactcagaaatcgggggcatcaccatcgcctggaagtttgactccccggaacgcaacctgtggaacctgaaaccattcaccacgcgggatttctccatcaggtccctggctgaccggctgggggacctgagctatctcatctatgtgtttcctgaccgccccaaggatgaggtcttctccaagtactacactcctgtgctggctaaagctgttgatggatatgtgaaaccacagatcaagcaagtggtccctgagtttgtgaatgcatctgcagatgctgggggcagcagcgccacgtacatggaccaggccccctccccagctgtgtgcccccaggctccctataacatgtacccacagaaccctgaccatgtactcgatcaggatggagaattcgacctggatgagaccatggatgtggccaggcacgtggaggaactcttacgccgaccaatggacagtcttgactcccgcctctcgccccctgccggtcttttcacctctgccagaggctccctctcatgaatgtttgaatcccacgcttctctttggaaacaatatgcaatgtgaagcggtcgtgttgtgagtttagtaaggttgtgtacactgacacctttgcaggcatgcatgtgcttgtgtgtgtgtgtgtgtgtgtgtccttgtgcatgagctacgcctgcctcccctgtgcagtcctgggatgtggctgcagcagcggtggcctcttttcagatcatggcatccaagagtgcgccgagtctgtctctgtcatggtagagaccgagcctctgtcactgcaggcactcaatgcagccagacctattcctcctgggcccctcatctgctcagcagctatttgaatgagatgattcagaaggggaggggagacaggtaacgtctgtaagctgaagtttcactccggagtgagaagctttgccctcctaagagagagagacagagagacagagagagagaaagagagagtgtgtgggtctatgtaaatgcatctgtcctcatgtgttgatgtaaccgattcatctctcagaagggaggctgggggttcattttcgagtagtattttatactttagtgaacgtggactccagactctctgtgaaccctatgagagcgcgtctgggcccggccatgtccttagcacaggggggccgccggtttgagtgagggtttctgagctgctctgaattagtccttgcttggctgcttggccttgggcttcattcaagtctatgatgctgttgcccacgtttcccgggatatatattctctcccctccgttgggccccagccttctttgcttgcctctctgtttgtaaccttgtcgacaaagaggtagaaaagattgggtctaggatatggtgggtggacaggggccccgggacttggagggttggtcctcttgcctcctggaaaaaacaaaaacaaaaaactgcagtgaaagacaagctgcaaatcagccatgtgctgcgtgcctgtggaatctggagtgaggggtaaaagctgatctggtttgactccgctggaggtggggcctggagcaggccttgcgctgttgcgtaactggctgtgttctggtgaggccttgctcccaaccccacacgctcctccctctgaggctgtaggactcgcagtcaggggcagctgaccatggaagattgagagcccaaggtttaaacttctctgaagggaggtggggatgagaagaggggtttttttgtactttgtacaaagaccacacatttgtgtaaacagtgttttggaataaaatatttttttcat

SEQ ID NO: 439 - protein, 794 aa, Homo sapiens
MAGWIQAQQLQGDALRQMQVLYGQHFPIEVRHYLAQWIESQPWDAIDLDNPQDRAQATQLLEGLVQELQKKAEHQVGEDGFLLKIKLGHYATQLQKTYDRCPLELVRCIRHILYNEQRLVREANNCSSPAGILVDAMSQKHLQINQTFEELRLVTQDTENELKKLQQTQEYFIIQYQESLRIQAQFAQLAQLSPQERLSRETALQQKQVSLEAWLQREAQTLQQYRVELAEKHQKTLQLLRKQQTIILDDELIQWKRRQQLAGNGGPPEGSLDVLQSWCEKLAEIIWQNRQQIRRAEHLCQQLPIPGPVEEMLAEVNATITDIISALVTSTFIIEKQPPQVLKTQTKFAATVRLLVGGKLNVHMNPPQVKATIISEQQAKSLLKNENTRNECSGEILNNCCVMEYHQATGTLSAHFRNMSLKRIKRADRRGAESVTEEKFTVLFESQFSVGSNELVFQVKTLSLPVVVIVHGSQDHNATATVLWDNAFAEPGRVPFAVPDKVLWPQLCEALNMKFKAEVQSNRGLTKENLVFLAQKLFNNSSSHLEDYSGLSVSWSQFNRENLPGWNYTFWQWFDGVMEVLKKHHKPHWNDGAILGFVNKQQAHDLLINKPDGTFLLRFSDSEIGGITIAWKFDSPERNLWNLKPFTTRDFSIRSLADRLGDLSYLIYVFPDRPKDEVFSKYYTPVLAKAVDGYVKPQIKQVVPEFVNASADAGGSSATYMDQAPSPAVCPQAPYNMYPQNPDHVLDQDGEFDLDETMDVARHVEELLRRPMDSLDSRLSPPAGLFTSARGSLS

SEQ ID NO: 440 - DNA, 4924 bp, Homo sapiens
tctcctcctaccggtcgggtgccccggggcgttccctctgccgctgcttctcggcgcggttcctacccggccgctccccgaggcgcgggctctggcggcctcgaccgactaggacgccccgtgcgccgcccgcgggccgccgcctccctgggcgcgcggggccagcatggagctcttccaagccaaggaccactacatcctgcagcagggcgagcgcgcgctgtggtgcagccgccgcgacggcggcctccagctccgacccgctactgatctacttcttgcctggaatcccatttgtttggggttggtagaaggtgttattgggaaaattcaacttcattcagatcttccatggtggcttattctaattcggcagaaagcattggtgggcaaactcccaggagaccatgaggtctgtaaagttaccaaaattgctgtgctctcactttctgaaatggaacctcaggatcttgagctagagctctgtaagaagcatcattttggtattaacaaaccagagaagatcataccatctcctgatgactcaaagtttctactgaagacctttacgcatattaaatccaatgtgtctgctcctaataaaaagaaagttaaggaaagtaaagagaaggagaagttggagaggagattacttgaagagttgctgaagatgttcatggactcagaatccttttattatagcttgacctatgacctgaccaattccgtgcagaggcagagcactggggagagggacggtcggcccctctggcagaaggttgatgaccgatttttttggaataaatacatgatacaagatcttactgagattggtactccagatgtggacttttggattatccccatgatccaaggttttgtgcagattgaagaacttgtggttaattataccgaatcatctgatgatgagaaaagcagcccagagaccccccctcaggagtccacctgtgtagatgatattcacccacgatttctagtggctctcatttcacgccgaagtaggcacagagcaggaatgcgctataaacgaagaggagtggataaaaatggaaatgttgccaattatgtggagactgagcagttgattcatgttcataatcataccctgtcatttgttcaaacacgaggctctgtgcctgtcttttggagccaggttgggtatcgatataacccaagaccgcggctggacagaagtgaaaaggaaactgttgcctatttctgtgcccatttcgaagaacaactgaacatttacaaaaaacaggttattattaacttggtagaccaggcaggaagagagaagattattggcgatgcttacctgaagcaagtgttgcttttcaacaactcacacctcacttacgtttcgtttgacttccatgagcactgccgaggaatgaagtttgagaatgttcagacactaacagatgccatttatgacattattcttgatatgaagtggtgttgggttgatgaagctggggtaatatgtaagcaggaagggatttttcgtgttaattgtatggactgcctggatcgcaccaacgtggtccaagctgccatcgcgagagtggtcatggaacagcagctgaaaaaattaggtgtgatgcccccggaacagccattacctgtgaaatgtaatcgcatctaccagataatgtgggccaataatggtgactccattagcagacagtatgctgggacagctgctctgaagggtgactttacaaggacaggagaaaggaagttagcaggagttatgaaagatggagtgaactcagcaaacagatattacctcaaccgatttaaggatgcttataggcaagctgttatagatttgatgcaaggcattccagtgacagaagatctttattccatatttaccaaggagaaagaacatgaagctttgcataaggaaaatcagagaagccaccaggaactaattagccagctcttacaaagttacatgaagttactactgcctgatgatgagaagttccatgggggctgggccctcattgactgtgaccctagcctcattgatgctactcacagagacgtggatgtgctgttactgctttctaactctgcctactacgtggcctattatgatgatgaagttgataaagtaaaccagtatcaacgactaagtctagaaaacctggaaaaaattgaaataggccctgaacccactctttttggtaagccaaagttctcctgcatgcgactgcactacagatacaaagaagcgagtggctatttccacacattgcgagctgtaatgcgtaatcctgaagaggatggaaaagatacccttcagtgcattgcagagatgctgcagatcaccaagcaagccatgggatcggatttacccataattgagaagaaacttgagaggaagagcagtaaacctcacgaagacatcattggtatcaggtctcaaaaccaaggttctttggcccagggaaagaattttttaatgagcaaattttcatctctaaatcaaaaagtgaagcagaccaaatccaatgtaaatattggcaacctccgaaagctaggaaactttaccaaacctgaaatgaaagttaactttctaaaaccaaacttaaaagtaaatctttggaaatcagatagtagtcttgaaactatggaaaacacaggagtgatggataaggttcaggcagagtctgatggggacatgtcttcagataatgactcataccactctgatgaattccttacaaattctaagtctgatgaagacaggcagctagctaactcattagagagtgtagggccaatagattacgttcttcctagttgtggtattattgcctcagcgcctcgattgggcagtcggtcccagtctcttagcagcacagatagtagcgttcatgctccttcagagattactgttgctcatgggagtgggcttggaaaaggccaggagtctcctttgaagaaaagtccttctgctggcgacgtacacatattgactggctttgccaagcctatggatatttactgccacagatttgtgcaagatgcacagaacaaagtgacccacctatcagagaccagatctgtgtctcagcaggctagtcaggaaagaaatcaaatgaccaatcaagtttcaaatgaaacccaatcagaatcaacagaacagacaccttctcggccatcgcaattagatgtctctctttctgcaacaggcccacagtttttgtcagttgagccagcgcattcagttgcatctcaaaaaacccccacctccgcttccagcatgcttgaacttgagacagggcttcatgtaactccttctccttcagagagcagtagcagcagagcagtctctccctttgccaagattcgaagttccatggtccaggttgctagtattacccaagctggattaacccatgggataaactttgcagtgtcaaaagttcagaagagtcctccagaacctgaaatcattaatcaagtccagcaaaatgaacttaaaaagatgtttatacaatgccagacacggataattcagatttagcttttagccataagaatccttccatggcttttatttaaaaatatgaaattttcacctcttggggtattttaattgtactgtctgaacccagggatcacaaattctgttcattggaaagggttttaaacggagtcggaacctgagtagatttccaaattttacagccaggactacagaagtgcatcattctagaatgtgtagacctgagtagcttatacactacagagcactttgcttatttgaaagtaattcagcaacaggtcactttgggatataacctgaacctttttttggagtggggtgggtagactacagtagacacaagggctggacatgcagatgcttaggggattagcgtttttcataatttgttctgtttgtcagttcattcctgtgtgttcttacctctacaaagtaaattacacatttagtttttagtgactttaacatgttactgaagcatttgaatataaagctattttagttttgatggcttaactgttccctgaggagttgagggttattgacactagagaaatgaattctcatttgatcctaattttccccgtattctacttgaacacattaaaaatactctgctgcctatacaatgtaaacctaggagcattaagacttgtcacacagtaaacctgatacatcagaggtgaataccagcacctattaggtttcattttgctgttttcaggaatgtaagaacacccatattggctactggaaattctagcagtcagtcaggttttaatttattccaggaggggcatcctcgacatcttatgtagatgatccacaacttcaaaatttagtctgggcctagtgcagtggctcacacctataatcccaacactttgggaggccaggagttttgagaccagcctgggaaacatctgcctctacaaaaaaatacaaaaattagctgggcatagtggtgcatgcctgtgtttctagctacgcaggaggattgcttgagcccatgagattgaggctgcagtgagctgtgatcgtgccactgacctccagcctgggggacagagcaagaccgtgtctcaaaaacaatttagtctgaaacacaattgtgctgaatctgtctgactataactctgaccacacagaaccagggctgcccctgtaatccccacagtaagaaagttgtatggcatattccaacaagtattggttcgtctggtgtctttagagctttactctgttgaagtgactgattctcaactgaacattatgtcgttactttgataagcattccacttttgttatttattagtgctatctttttttttacgtgttaaatcttgtgattattaaaataaagtaccattgtaattt

SEQ ID NO: 441 - protein, 1132 aa, Homo sapiens
MELFQAKDHYILQQGERALWCSRRDGGLQLRPATDLLLAWNPICLGLVEGVIGKIQLHSDLPWWLILIRQKALVGKLPGDHEVCKVTKIAVLSLSEMEPQDLELELCKKHHFGINKPEKIIPSPDDSKFLLKTFTHIKSNVSAPNKKKVKESKEKEKLERRLLEELLKMFMDSESFYYSLTYDLTNSVQRQSTGERDGRPLWQKVDDRFFWNKYMIQDLTEIGTPDVDFWIIPMIQGFVQIEELVVNYTESSDDEKSSPETPPQESTCVDDIHPRFLVALISRRSRHRAGMRYKRRGVDKNGNVANYVETEQLIHVHNHTLSFVQTRGSVPVFWSQVGYRYNPRPRLDRSEKETVAYFCAHFEEQLNIYKKQVIINLVDQAGREKIIGDAYLKQVLLFNNSHLTYVSFDFHEHCRGMKFENVQTLTDAIYDIILDMKWCWVDEAGVICKQEGIFRVNCMDCLDRTNVVQAAIARVVMEQQLKKLGVMPPEQPLPVKCNRIYQIMWANNGDSISRQYAGTAALKGDFTRTGERKLAGVMKDGVNSANRYYLNRFKDAYRQAVIDLMQGIPVTEDLYSIFTKEKEHEALHKENQRSHQELISQLLQSYMKLLLPDDEKFHGGWALIDCDPSLIDATHRDVDVLLLLSNSAYYVAYYDDEVDKVNQYQRLSLENLEKIEIGPEPTLFGKPKFSCMRLHYRYKEASGYFHTLRAVMRNPEEDGKDTLQCIAEMLQITKQAMGSDLPIIEKKLERKSSKPHEDIIGIRSQNQGSLAQGKNFLMSKFSSLNQKVKQTKSNVNIGNLRKLGNFTKPEMKVNFLKPNLKVNLWKSDSSLETMENTGVMDKVQAESDGDMSSDNDSYHSDEFLTNSKSDEDRQLANSLESVGPIDYVLPSCGIIASAPRLGSRSQSLSSTDSSVHAPSEITVAHGSGLGKGQESPLKKSPSAGDVHILTGFAKPMDIYCHRFVQDAQNKVTHLSETRSVSQQASQERNQMTNQVSNETQSESTEQTPSRPSQLDVSLSATGPQFLSVEPAHSVASQKTPTSASSMLELETGLHVTPSPSESSSSRAVSPFAKIRSSMVQVASITQAGLTHGINFAVSKVQKSPPEPEIINQVQQNELKKMFIQCQTRIIQI

SEQ ID NO: 442 - DNA, 6030 bp, Homo sapiens
gttggcccccgttacttttcctctgggaaatatggcgcacgctgggagaacagggtacgataaccgggagatagtgatgaagtacatccattataagctgtcgcagaggggctacgagtgggatgcgggagatgtgggcgccgcgcccccgggggccgcccccgcgccgggcatcttctcctcgcagcccgggcacacgccccatacagccgcatcccgggacccggtcgccaggacctcgccgctgcagaccccggctgcccccggcgccgccgcggggcctgcgctcagcccggtgccacctgtggtccacctgaccctccgccaggccggcgacgacttctcccgccgctaccgccgcgacttcgccgagatgtccaggcagctgcacctgacgcccttcaccgcgcggggacgctttgccacggtggtggaggagctcttcagggacggggtgaactgggggaggattgtggccttctttgagttcggtggggtcatgtgtgtggagagcgtcaaccgggagatgtcgcccctggtggacaacatcgccctgtggatgactgagtacctgaaccggcacctgcacacctggatccaggataacggaggctgggatgcctttgtggaactgtacggccccagcatgcggcctctgtttgatttctcctggctgtctctgaagactctgctcagtttggccctggtgggagcttgcatcaccctgggtgcctatctgggccacaagtgaagtcaacatgcctgccccaaacaaatatgcaaaaggttcactaaagcagtagaaataatatgcattgtcagtgatgttccatgaaacaaagctgcaggctgtttaagaaaaaataacacacatataaacatcacacacacagacagacacacacacacacaacaattaacagtcttcaggcaaaacgtcgaatcagctatttactgccaaagggaaatatcatttattttttacattattaagaaaaaaagatttatttatttaagacagtcccatcaaaactcctgtctttggaaatccgaccactaattgccaagcaccgcttcgtgtggctccacctggatgttctgtgcctgtaaacatagattcgctttccatgttgttggccggatcaccatctgaagagcagacggatggaaaaaggacctgatcattggggaagctggctttctggctgctggaggctggggagaaggtgttcattcacttgcatttctttgccctgggggctgtgatattaacagagggagggttcctgtggggggaagtccatgcctccctggcctgaagaagagactctttgcatatgactcacatgatgcatacctggtgggaggaaaagagttgggaacttcagatggacctagtacccactgagatttccacgccgaaggacagcgatgggaaaaatgcccttaaatcataggaaagtatttttttaagctaccaattgtgccgagaaaagcattttagcaatttatacaatatcatccagtaccttaagccctgattgtgtatattcatatattttggatacgcaccccccaactcccaatactggctctgtctgagtaagaaacagaatcctctggaacttgaggaagtgaacatttcggtgacttccgcatcaggaaggctagagttacccagagcatcaggccgccacaagtgcctgcttttaggagaccgaagtccgcagaacctgcctgtgtcccagcttggaggcctggtcctggaactgagccggggccctcactggcctcctccagggatgatcaacagggcagtgtggtctccgaatgtctggaagctgatggagctcagaattccactgtcaagaaagagcagtagaggggtgtggctgggcctgtcaccctggggccctccaggtaggcccgttttcacgtggagcatgggagccacgacccttcttaagacatgtatcactgtagagggaaggaacagaggccctgggcccttcctatcagaaggacatggtgaaggctgggaacgtgaggagaggcaatggccacggcccattttggctgtagcacatggcacgttggctgtgtggccttggcccacctgtgagtttaaagcaaggctttaaatgactttggagagggtcacaaatcctaaaagaagcattgaagtgaggtgtcatggattaattgacccctgtctatggaattacatgtaaaacattatcttgtcactgtagtttggttttatttgaaaacctgacaaaaaaaaagttccaggtgtggaatatgggggttatctgtacatcctggggcattaaaaaaaaaatcaatggtggggaactataaagaagtaacaaaagaagtgacatcttcagcaaataaactaggaaatttttttttcttccagtttagaatcagccttgaaacattgatggaataactctgtggcattattgcattatataccatttatctgtattaactttggaatgtactctgttcaatgtttaatgctgtggttgatatttcgaaagctgctttaaaaaaatacatgcatctcagcgtttttttgtttttaattgtatttagttatggcctatacactatttgtgagcaaaggtgatcgttttctgtttgagatttttatctcttgattcttcaaaagcattctgagaaggtgagataagccctgagtctcagctacctaagaaaaacctggatgtcactggccactgaggagctttgtttcaaccaagtcatgtgcatttccacgtcaacagaattgtttattgtgacagttatatctgttgtccctttgaccttgtttcttgaaggtttcctcgtccctgggcaattccgcatttaattcatggtattcaggattacatgcatgtttggttaaacccatgagattcattcagttaaaaatccagatggcaaatgaccagcagattcaaatctatggtggtttgacctttagagagttgctttacgtggcctgtttcaacacagacccacccagagccctcctgccctccttccgcgggggctttctcatggctgtccttcagggtcttcctgaaatgcagtggtgcttacgctccaccaagaaagcaggaaacctgtggtatgaagccagacctccccggcgggcctcagggaacagaatgatcagacctttgaatgattctaatttttaagcaaaatattattttatgaaaggtttacattgtcaaagtgatgaatatggaatatccaatcctgtgctgctatcctgccaaaatcattttaatggagtcagtttgcagtatgctccacgtggtaagatcctccaagctgctttagaagtaacaatgaagaacgtggacgcttttaatataaagcctgttttgtcttctgttgttgttcaaacgggattcacagagtatttgaaaaatgtatatatattaagaggtcacgggggctaattgctggctggctgccttttgctgtggggttttgttacctggttttaataacagtaaatgtgcccagcctcttggccccagaactgtacagtattgtggctgcacttgctctaagagtagttgatgttgcattttccttattgttaaaaacatgttagaagcaatgaatgtatataaaagcctcaactagtcatttttttctcctcttcttttttttcattatatctaattattttgcagttgggcaacagagaaccatccctattttgtattgaagagggattcacatctgcatcttaactgctctttatgaatgaaaaaacagtcctctgtatgtactcctctttacactggccagggtcagagttaaatagagtatatgcactttccaaattggggacaagggctctaaaaaaagccccaaaaggagaagaacatctgagaacctcctcggccctcccagtccctcgctgcacaaatactccgcaagagaggccagaatgacagctgacagggtctatggccatcgggtcgtctccgaagatttggcaggggcagaaaactctggcaggcttaagatttggaataaagtcacagaatcaaggaagcacctcaatttagttcaaacaagacgccaacattctctccacagctcacttacctctctgtgttcagatgtggccttccatttatatgtgatctttgttttattagtaaatgcttatcatctaaagatgtagctctggcccagtgggaaaaattaggaagtgattataaatcgagaggagttataataatcaagattaaatgtaaataatcagggcaatcccaacacatgtctagctttcacctccaggatctattgagtgaacagaattgcaaatagtctctatttgtaattgaacttatcctaaaacaaatagtttataaatgtgaacttaaactctaattaattccaactgtacttttaaggcagtggctgtttttagactttcttatcacttatagttagtaatgtacacctactctatcagagaaaaacaggaaaggctcgaaatacaagccattctaaggaaattagggagtcagttgaaattctattctgatcttattctgtggtgtcttttgcagcccagacaaatgtggttacacactttttaagaaatacaattctacattgtcaagcttatgaaggttccaatcagatctttattgttattcaatttggatctttcagggattttttttttaaattattatgggacaaaggacatttgttggaggggtgggagggaggaacaatttttaaatataaaacattcccaagtttggatcagggagttggaagttttcagaataaccagaactaagggtatgaaggacctgtattggggtcgatgtgatgcctctgcgaagaaccttgtgtgacaaatgagaaacattttgaagtttgtggtacgacctttagattccagagacatcagcatggctcaaagtgcagctccgtttggcagtgcaatggtataaatttcaagctggatatgtctaatgggtatttaaacaataaatgtgcagttttaactaacaggatatttaatgacaaccttctggttggtagggacatctgtttctaaatgtttattatgtacaatacagaaaaaaattttataaaattaagcaatgtgaaactgaattggagagtgataatacaagtcctttagtcttacccagtgaatcattctgttccatgtctttggacaaccatgaccttggacaatcatgaaatatgcatctcactggatgcaaagaaaatcagatggagcatgaatggtactgtaccggttcatctggactgccccagaaaaataacttcaagcaaacatcctatcaacaacaaggttgttctgcataccaagctgagcacagaagatgggaacactggtggaggatggaaaggctcgctcaatcaagaaaattctgagactattaataaataagactgtagtgtagatactgagtaaatccatgcacctaaaccttttggaaaatctgccgtgggccctccagatagctcatttcattaagtttttccctccaaggtagaatttgcaagagtgacagtggattgcatttcttttggggaagctttcttttggtggttttgtttattataccttcttaagttttcaaccaaggtttgcttttgttttgagttactggggttatttttgttttaaataaaaataagtgtacaataagtgtttttgtattgaaagcttttgttatcaagattttcatacttttaccttccatggctctttttaagattgatacttttaagaggtggctgatattctgcaacactgtacacataaaaaatacggtaaggatactttacatggttaaggtaaagtaagtctccagttggccaccattagctataatggcactttgtttgtgttgttggaaaaagtcacattgccattaaactttccttgtctgtctagttaatattgtgaagaaaaataaagtacagtgtgagatactg

SEQ ID NO: 443 - protein, 205 aa, Homo sapiens
MAHAGRTGYDNREIVMKYIHYKLSQRGYEWDAGDVGAAPPGAAPAPGIFSSQPGHTPHPAASRDPVARTSPLQTPAAPGAAAGPALSPVPPVVHLALRQAGDDFSRRYRGDFAEMSSQLHLTPFTARGRFATVVEELFRDGVNWGRIVAFFEFGGVMCVESVNREMSPLVDNIALWMTEYLNRHLHTWIQDNGGWVGASGDVSLG

SEQ ID NO: 444 - DNA, 4604 bp, Homo sapiens
ggaacagcttgtccacccgccggccggaccagaagcctttgggtctgaagtgtctgtgagacctcacagaagagcacccctgggctccacttacctgccccctgctccttcagggatggaggcaatggcggccagcacttccctgcctgaccctggagactttgaccggaacgtgccccggatctgtggggtgtgtggagaccgagccactggctttcacttcaatgctatgacctgtgaaggctgcaaaggcttcttcaggcgaagcatgaagcggaaggcactattcacctgccccttcaacggggactgccgcatcaccaaggacaaccgacgccactgccaggcctgccggctcaaacgctgtgtggacatcggcatgatgaaggagttcattctgacagatgaggaagtgcagaggaagcgggagatgatcctgaagcggaaggaggaggaggccttgaaggacagtctgcggcccaagctgtctgaggagcagcagcgcatcattgccatactgctggacgcccaccataagacctacgaccccacctactccgacttctgccagttccggcctccagttcgtgtgaatgatggtggagggagccatccttccaggcccaactccagacacactcccagcttctctggggactcctcctcctcctgctcagatcactgtatcacctcttcagacatgatggactcgtccagcttctccaatctggatctgagtgaagaagattcagatgacccttctgtgaccctagagctgtcccagctctccatgctgccccacctggctgacctggtcagttacagcatccaaaaggtcattggctttgctaagatgataccaggattcagagacctcacctctgaggaccagatcgtactgctgaagtcaagtgccattgaggtcatcatgttgcgctccaatgagtccttcaccatggacgacatgtcctggacctgtggcaaccaagactacaagtaccgcgtcagtgacgtgaccaaagccggacacagcctggagctgattgagcccctcatcaagttccaggtgggactgaagaagctgaacttgcatgaggaggagcatgtcctgctcatggccatctgcatcgtctccccagatcgtcctggggtgcaggacgccgcgctgattgaggccatccaggaccgcctgtccaacacactgcagacgtacatccgctgccgccacccgcccccgggcagccacctgctctatgccaagatgatccagaagctagccgacctgcgcagcctcaatgaggagcactccaagcagtaccgctgcctctccttccagcctgagtgcagcatgaagctaacgccccttgtgctcgaagtgtttggcaatgagatctcctgactaggacagcctgtgcggtgcctgggtggggctgctcctccagggccacgtgccaggcccggggctggcggctactcagcagccctcctcacccgtctggggttcagcccctcctctgccacctcccctatccacccagcccattctctctcctgtccaacctaacccctttcctgcgggcttttccccggtcccttgagacctcagccatgaggagttgctgtttgtttgacaaagaaacccaagtgggggcagagggcagaggctggaggcaggccttgcccagagatgcctccaccgctgcctaagtggctgctgactgatgttgagggaacagacaggagaaatgcatccattcctcagggacagagacacctgcacctccccccactgcaggccccgcttgtccagcgcctagtggggtctccctctcctgccttactcacgataaataatcggcccacagctcccaccccacccccttcagtgcccaccaacatcccattgccctggttatattctcacgggcagtagctgtggtgaggtgggttttcttcccatcactggagcaccaggcacgaacccacctgctgagagacccaaggaggaaaaacagacaaaaacagcctcacagaagaatatgacagctgtccctgtcaccaagctcacagttcctcgccctgggtctaaggggttggttgaggtggaagccctccttccacggatccatgtagcaggactgaattgtccccagtttgcagaaaagcacctgccgacctcgtcctccccctgccagtgccttacctcctgcccaggagagccagccctccctgtcctcctcggatcaccgagagtagccgagagcctgctcccccaccccctccccaggggagagggtctggagaagcagtgagccgcatcttctccatctggcagggtgggatggaggagaagaattttcagaccccagcggctgagtcatgatctccctgccgcctcaatgtggttgcaaggccgctgttcaccacagggctaagagctaggctgccgcaccccagagtgtgggaagggagagcggggcagtctcgggtggctagtcagagagagtgtttgggggttccgtgatgtagggtaaggtgccttcttattctcactccaccacccaaaagtcaaaaggtgcctgtgaggcaggggcggagtgatacaacttcaagtgcatgctctctgcaggtcgagcccagcccagctggtgggaagcgtctgtccgtttactccaaggtgggtctttgtgagagtgagctgtaggtgtgcgggaccggtacagaaaggcgttcttcgaggtggatcacagaggcttcttcagatcaatgcttgagtttggaatcggccgcattccctgagtcaccaggaatgttaaagtcagtgggaacgtgactgccccaactcctggaagctgtgtccttgcacctgcatccgtagttccctgaaaacccagagaggaatcagacttcacactgcaagagccttggtgtccacctggccccatgtctctcagaattcttcaggtggaaaaacatctgaaagccacgttccttactgcagaatagcatatatatcgcttaatcttaaatttattagatatgagttgttttcagactcagactccatttgtattatagtctaatatacagggtagcaggtaccactgatttggagatatttatggggggagaacttacattgtgaaacttctgtacattaattattattgctgttgttattttacaagggtctagggagagacccttgtttgattttagctgcagaactgtattggtccagcttgctcttcagtgggagaaaaacacttgtaagttgctaaacgagtcaatcccctcattcaggaaaactgacagaggagggcgtgactcacccaagccatatataactagctagaagtgggccaggacaggccgggcgcggtggctcacgcctgtaatcccagcagtttgggaggtcgaggtaggtggatcacctgaggtcgggagttcgagaccaacctgaccaacatggagaaaccctgtctctattaaaaatacaaaaaaaaaaaaaaaaaaaaatagccgggcatggtggcgcaagcctgtaatcccagctactcaggaggctgaggcagaagaattgaacccaggaggtggaggttgcagtgagctgagatcgtgccgttactctccaacctggacaacaagagcgaaactccgtcttagaagtggaccaggacaggaccagattttggagtcatggtccggtgtccttttcactacaccatgtttgagctcagacccccactctcattccccaggtggctgacccagtccctgggggaagccctggatttcagaaagagccaagtctggatctgggaccctttccttccttccctggcttgtaactccaccaagcccatcagaaggagaaggaaggagactcacctctgcctcaatgtgaatcagaccctaccccaccacgatgtgccctggctgctgggctctccacctcaggccttggataatgctgttgcctcatctataacatgcatttgtctttgtaatgtcaccaccttcccagctctccctctggccctgcttcttcggggaactcctgaaatatcagttactcagccctgggccccaccacctaggccactcctccaaaggaagtctaggagctgggaggaaaagaaaagaggggaaaatgagtttttatggggctgaacggggagaaaaggtcatcatcgattctactttagaatgagagtgtgaaatagacatttgtaaatgtaaaacttttaaggtatatcattataactgaaggagaaggtgccccaaaatgcaagattttccacaagattcccagagacaggaaaatcctctggctggctaactggaagcatgtaggagaatccaagcgaggtcaacagagaaggcaggaatgtgtggcagatttagtgaaagctagagatatggcagcgaaaggatgtaaacagtgcctgctgaatgatttccaaagagaaaaaaagtttgccagaagtttgtcaagtcaaccaatgtagaaagctttgcttatggtaataaaaatggctcatacttatatagcacttactttgtttgcaagtactgctgtaaataaatgctttatgcaaacc

SEQ ID NO: 445 - protein, 427 aa, Homo sapiens
MEAMAASTSLPDPGDFDRNVPRICGVCGDRATGFHFNAMTCEGCKGFFRRSMKRKALFTCPFNGDCRITKDNRRHCQACRLKRCVDIGMMKEFILTDEEVQRKREMILKRKEEEALKDSLRPKLSEEQQRIIAILLDAHHKTYDPTYSDFCQFRPPVRVNDGGGSHPSRPNSRHTPSFSGDSSSSCSDHCITSSDMMDSSSFSNLDLSEEDSDDPSVTLELSQLSMLPHLADLVSYSIQKVIGFAKMIPGFRDLTSEDQIVLLKSSAIEVIMLRSNESFTMDDMSWTCGNQDYKYRVSDVTKAGHSLELIEPLIKFQVGLKKLNLHEEEHVLLMAICIVSPDRPGVQDAALIEAIQDRLSNTLQTYIRCRHPPPGSHLLYAKMIQKLADLRSLNEEHSKQYRCLSFQPECSMKLTPLVLEVFGNEIS

SEQ ID NO: 446 - DNA, 4935 bp, Homo sapiens
atacaatagtgctccgcgccgcctcagccgccgccgccgcccaaccgcctgcccagcgctgaggcctgacgggccgggcggacgagggccgagggcgggagctgaggcgcggggggcggccccggcggggggcgggggcgaggaggggattaaggggcaggtgcgagggagggaagagaagaaagcgagcggttaggggggcggttaccactccgaccggactcacccggcacattgccgggccgcggcgtggagccgggcaggagccgcgagccagctgcgcgaaggatgctccaggatgaaacgccataggcctgtcagcagcagtgacagttcagacgaaagtccttccacttcctttacttctggctcaatgtataggatcaagtcaaaaattccaaatgaacacaagaaacctgctgaggtattccggaaggacctcatcagtgccatgaaacttccagattctcaccacattaatcctgatagctattacctctttgctgatacatggaaggaagaatgggaaaagggagtccaggtaccagccagtccagacaccgttccacagccttctctcaggattatagctgagaaggtaaaggacgttctgtttatccgaccccggaagtatattcactgctccagcccagacaccacagagcctggctacatcaacatcatggagttggcagcatctgtttgccgctatgacctagatgacatggacatcttctggcttcaggaactcaatgaagaccttgcagaaatgggttgtgggccagttgatgagaatcttatggaaaagacagtagaagtcctggaacgccattgccatgaaaatatgaaccatgctattgagacagaggaagggctaggcatagagtatgatgaagatgtgatctgtgatgtgtgccggtctccagacagtgaagaagggaatgatatggtgttctgtgataagtgtaacgtctgtgtgcatcaggcctgctatggcatcctcaaggtcccagaaggcagctggctgtgtcgctcctgtgtcctgggcatttatccgcaatgtgtgttatgtccaaagaaaggtggagccctgaagaccaccaagacagggactaaatgggctcatgtcagctgtgccctgtggatcccagaggtcagcattgcttgtcctgagaggatggaaccgatcacgaagatctcccacatcccacccagtcggtgggccttagtctgcaacttgtgcaagttgaagacgggggcttgtattcagtgctctataaaaagctgcatcactgccttccacgtcacctgtgcctttgagcacggcctagagatgaagaccatcctagatgagggagacgaagtgaagttcaagtcatattgcctcaagcatagccaaaacaggcagaaacttggagaagctgagtacccccaccacagggctaaagagcagagccaggccaaaagtgagaaaaccagcctgcgggcacagaagcttcgggagctggaggaggagttctattccttggtacgagtggaagatgtggccgcagagctgggtatgcccacgctagctgtggactttatctataactactggaaactgaagcggaaaagtaacttcaataagccattatttcctccaaaggaggatgaagaaaatgggctggtgcagccaaaagaggaaagcattcacactcgaatgagaatgtttatgcatctacgccaggacctggagagggtccgaaatctgtgctatatgataagcagacgagagaagctgaagctgtcacacaacaaaatacaggaacagatcttcggtttgcaagtccagcttcttaaccaagaaattgatgcagggcttcctttgacaaatgcacttgaaaactcactgttttacccaccaccaagaattaccttgaagttaaaaatgcccaaatcaaccccagaagaccacagaaacagctccacagaaaccgatcagcagccccactctcctgacagcagctcatctgttcacagtataaggaacatgcaggtgcctcaggagtcactagaaatgagaacaaaatcgtatccgagatacccactagagagcaagaataaccgtttgctggccagtctcagccattctaggagtgaagcaaaggagtccagtcctgcttggagaaccccgtcctcggagtgctatcatgggcagtcactgggaaagcctctggtccttcaggctgccctccatggacagtcttccattgggaatgggaaaagtcagcctaactccaagtttgccaaatccaatggcctggagggcagctggtctgggaatgtcacccaaaaagacagctcgagtgagatgttctgtgaccaggagcctgtgttcagcccccacttggtcagtcagggcagctttagaaaatccactgtagaacactttagtaggtcctttaaagagaccaccaataggtgggtgaagaacacagaggacctccagtgctatgtgaagccaaccaagaatatgagccccaaggagcagttctggggtagacaggttctcaggcggtctgcagggagagctccatatcaggaaaatgatggctattgcccagatttggagctgagtgattcagaggcagaaagtgatgggaataaagaaaaagtcagggtaaggaaagatagctcagacagggaaaatcctccccatgactctagacgggattgccatggtaaaagcaagacacatcccctttcccacagttcaatgcaaaggtgattagaaacttccaaggatgacccaacctttgcctttgccccatatattggggaaaacccatacaccaaaaggattttagcatatgttaagaggaattgcagtgaaaaggataacatttttccatagtaaattgtcttgcagtttttgaaaatgtttcaagtctagtttttacaagcacattacagtaattgcaggttgtccagaggttggtttgtcagaggctattgggaacagctgggcccagggtatttgctcagtaaatattttggggcagctttccggttatataacacattgacaagtatatgtattaagagtccttgcattgttaactgatttgcaagagaccatgattatcagacactaaaactacttatcttttgaagctacagcatgtgactccccagagctcctgtctgtaggaagtttctaattccactggtatctataaacccttttcaggggagagaccaggagaccaccatcttagatactgtcaaactcactactgtcttcctttgttctgcacaaggttgagtttctttcacagtatcttaacttactgagtcaatactcctcatgcttatcagtgtccagtgcctgtttctaaacttgcttgttggggacacactcataactatttcacctgactgacaagcataaaaggctaacttgtggatagtgtttacaaaagtacaaaagtactacttccaaggaaaatgctctgattctctgtttaggcatttgtgaaggattccagagcctttcccaaagtgagaccatttctggggtatttgtaccaggtcagggtttttgtgttgttttcaaataagtttgactaaaataagtttggctgacagtttttgtatacctgctttaatgtttataaaatttttattgaggtataattaaaatatagtaaaatgcacagaggttaagtattcttacctgctttaattttgaaacagatttttattgtcaaacagaatttgaaagcatgtgtttaacacatggatataatttagctttgtgtcacctttgaatctgaggcagtttcccaaacaaaaaggctggagccatttttcagaagttgcttataccctgttcccaaactatcagccttgattaatttctagtaggaagagaataattacatttgcggggggggggggtggataaaaacatgtctgcttctcatttaaataagagagaaatgatgccgttttttaaatgtgaagcagactataattctcagctctcttttcttcttagccttaaattaatattctctttcttctagttttggaaagtgtagtgggaatattcagacaaaagaggccattttccatttttaaagcttcttactggtgaaacagcccagttgtagtaggtgccagtcagtcaaggcaggggccctctctccgtcaatatggaaaactcagcagttttcctctcccccagttgtgttcttgtaacgttgttaatgggttcctttgctttttgctttctccttttctgaaaatgtatgtgttttgcctctcttttggctacatcttcaaaatatttcttttgtgcctatgtacatgtgtaaacatgccatagcatgtgtggtaggtgtcctgtattttgtttgggaaaaaaactatcaaaatgaggaagagaatttcccctatttatgcactaggtttctgtgctttttctttgagttctctggagtagatattaatttgataccttcatggtaatgaaattatgatggagctgtgttataaattccttatgtcagaggccagtgcggtagcctttgtcccttcatgcctttcaattctgagtgggaggaaaagcaaacatcaaaacagtgcttcagccaaattccatatgtaatgccattgggagagtattgactaaaatatcattcgtcagggaaatatagttgtaatatttttacaggatattcctaggtaaatgaaggagccttcagttgtaaatttcaattaccccaaaatgtatttgctacattttgttgtttgaagtattacctcttaaccttctttgttaatttttttcattttgtcttatatagtccagttttccaagataagctcagtcctttttcaaatgtcacctttttaccaatactttttcattaaattatgaaaactgct

SEQ ID NO: 447 - protein, 823 aa, Homo sapiens
MKRHRPVSSSDSSDESPSTSFTSGSMYRIKSKIPNEHKKPAEVFRKDLISAMKLPDSHHINPDSYYLFADTWKEEWEKGVQVPASPDTVPQPSLRIIAEKVKDVLFIRPRKYIHCSSPDTTEPGYINIMELAASVCRYDLDDMDIFWLQELNEDLAEMGCGPVDENLMEKTVEVLERHCHENMNHAIETEEGLGIEYDEDVICDVCRSPDSEEGNDMVFCDKCNVCVHQACYGILKVPEGSWLCRSCVLGIYPQCVLCPKKGGALKTTKTGTKWAHVSCALWIPEVSIACPERMEPITKISHIPPSRWALVCNLCKLKTGACIQCSIKSCITAFHVTCAFEHGLEMKTILDEGDEVKFKSYCLKHSQNRQKLGEAEYPHHRAKEQSQAKSEKTSLRAQKLRELEEEFYSLVRVEDVAAELGMPTLAVDFIYNYWKLKRKSNFNKPLFPPKEDEENGLVQPKEESIHTRMRMFMHLRQDLERVRNLCYMISRREKLKLSHNKIQEQIFGLQVQLLNQEIDAGLPLTNALENSLFYPPPRITLKLKMPKSTPEDHRNSSTETDQQPHSPDSSSSVHSIRNMQVPQESLEMRTKSYPRYPLESKNNRLLASLSHSRSEAKESSPAWRTPSSECYHGQSLGKPLVLQAALHGQSSIGNGKSQPNSKFAKSNGLEGSWSGNVTQKDSSSEMFCDQEPVFSPHLVSQGSFRKSTVEHFSRSFKETTNRWVKNTEDLQCYVKPTKNMSPKEQFWGRQVLRRSAGRAPYQENDGYCPDLELSDSEAESDGNKEKVRVRKDSSDRENPPHDSRRDCHGKSKTHPLSHSSMQR

SEQ ID NO: 448 - DNA, 2611 bp, Homo sapiens
cgcctctcccaaagtctagccgggcaggggaacgcggtgcattcctgaccggcacctggcgaggctcatgcgtcccgtgagggcggttcctcgagcctgggggcgctcagattgctttggagacgctgagagaacctttgcgagagcgccggttgacgtgcggagtgcggggctccgggggactgagcagcacgagaccccatcctcccctccgggttttcacactgggcgaagggaggactcctgagctctgcctcttccagtaacattgaggattactgtgttttgtgagagctcgctaggcgccctaagcaacagagttctgagaaatcgagaaacatgataaggaattggctgactatttttatcctttttcccctgaagctcgtagagaaatgtgagtcaagcgtcagcctcactgttcctcctgtcgtaaagctggagaacggcagctcgaccaacgtcagcctcaccctgcggccaccattaaatgcaaccctggtgatcacttttgaaatcacatttcgttccaaaaatattactatccttgagctccccgatgaagttgtggtgcctcctggagtgacaaactcctcttttcaagtgacatctcaaaatgttggacaacttactgtttatctacatggaaatcactccaatcagaccggcccgaggatacgctttcttgtgatccgcagcagcgccattagcatcataaaccaggtgattggctggatctactttgtggcctggtccatctccttctaccctcaggtgatcatgaattggaggcggaaaagtgtcattggtctgagcttcgacttcgtggctctgaacctgacaggcttcgtggcctacagtgtattcaacatcggcctcctctgggtgccctacatcaaggagcagtttctcctcaaataccccaacggagtgaaccccgtgaacagcaacgacgtcttcttcagcctgcacgcggttgtcctcacgctgatcatcatcgtgcagtgctgcctgtatgagcgcggtggccagcgcgtgtcctggcctgccatcggcttcctggtgctcgcgtggctcttcgcatttgtcaccatgatcgtggctgcagtgggagtgatcacgtggctgcagtttctcttctgcttctcctacatcaagctcgcagtcacgctggtcaagtattttccacaggcctacatgaacttttactacaaaagcactgagggctggagcattggcaacgtgctcctggacttcaccgggggcagcttcagcctcctgcagatgttcctccagtcctacaacaacgaccagtggacgctgatcttcggagacccaaccaagtttggactcggggtcttctccatcgtcttcgacgtcgtcttcttcatccagcacttctgtttgtacagaaagagaccggggtatgaccagctgaactagcacccagggacccagtgtacccagcctctggcctcgtgccctgctggggaaggcctcacccagcgaaggccggagaagcggttgggccctggcacacagggctggctcagtgtgcggacagaggagaccactctgctcctggggccagaggccattcaatagcctgccttcgtccgggcccctcctgggcctccccggccaggcacgtggcaccgtcgccttgacaccgccatctcttttctttaaggcttcaggcagcgcgcacaggctctggcagccgtctcaggcaggactgggcaccaagcttgcagccgaaggccttgccccaaactaccagcgtttctgcaagcagcttgaagggctgaccttgcagccgggtgagccaagggcactttgctgccaccgctgcattcccagagatcaagcagcccggtgccgtggccagtgaactcagaggtgctggtggacgggctaggactttggggttaggccatggggctctttctctgaaggccactttcctgacgtactctctgtacataactcagcgtccgtgactgcagtaacagccagccctacccagagtatttctgagccatgaggggcccaccagattggttctgaattggattcatgcccagcgcattagcatagtaactcctttcagattttttggagggacgtttggaagtggcttactctcttctgccctctctcctacctccaccttctcagatgagccccatctgagcacatccagctgctccttacccagcatctggagtacaggacatagctctctcctgctaccagtctgtgccttagaggtcgttaggcctgccaaacggcgaccagctcccctggagcgagggcaggccccttccctctctttccccagacacctacttgagactcaccaatttctggcctgttcaggagcctcagataagtatttgtacttgagaccacctcacacaatctgtatgggcccaaccctgatctcaaacctccttccctctgcccaaagctgtccttcctatggcaggaggggtgggggtcccaggacgtgcctcatacatgacttgagcttgtcagtccactgagtttccttctacgagatcaacgcgaggggcctgtatcttgaattaaagcctactcgcttcctttc

SEQ ID NO: 449 - protein, 367 aa, Homo sapiens
MIRNWLTIFILFPLKLVEKCESSVSLTVPPVVKLENGSSTNVSLTLRPPLNATLVITFEITFRSKNITILELPDEVVVPPGVTNSSFQVTSQNVGQLTVYLHGNHSNQTGPRIRFLVIRSSAISIINQVIGWIYFVAWSISFYPQVIMNWRRKSVIGLSFDFVALNLTGFVAYSVFNIGLLWVPYIKEQFLLKYPNGVNPVNSNDVFFSLHAVVLTLIIIVQCCLYERGGQRVSWPAIGFLVLAWLFAFVTMIVAAVGVITWLQFLFCFSYIKLAVTLVKYFPQAYMNFYYKSTEGWSIGNVLLDFTGGSFSLLQMFLQSYNNDQWTLIFGDPTKFGLGVFSIVFDVVFFIQHFCLYRKRPGYDQLN

SEQ ID NO: 450 - DNA, 4175 bp, Homo sapiens
gcgcgcgggcagctcacttccgcccggcaggtgacagccgcggggctccgagccgccggcagcccggacgcaccgggagagcgagaggtggaggccgcggacattttggtgccaagccgaaccgagccggggcgccgggagctattgggacctgcggaagcctggctacagataagggaccaaaatgactgactcaaaatatttcaccacgaccaagaaaggggagatcttcgagctgaaggcagagctcaacagtgacaagaaggagaagaagaaggaggcagtgaagaaagtgattgcatcgatgaccgtgggcaaagatgtcagtgccctcttccccgatgtggtcaactgcatgcagacggacaacctggagctgaagaagctagtatacctctacttgatgaattacgccaagagtcagcctgacatggccattatggccgtcaacacctttgtgaaggactgtgaggaccccaaccccctcatccgagccctggcagtgcggaccatgggctgcatccgcgttgacaagatcacagagtacctgtgcgagccactccggaagtgcctgaaggacgaggatccatatgtgcgcaagacagcagctgtgtgcgtggccaagctccacgacatcaacgcccagctggtggaggaccagggcttcctggacacccttaaagacctcatctccgactctaaccccatggtggtggccaatgcagtggcagcgctctcagaaattgccgagtctcaccccagcagcaacctgctcgatctgaacccacagtccatcaacaagctgctgacagccctcaatgagtgcaccgagtggggccagatcttcatcctggactgcctcgccaactatatgcccaaggacgaccgcgaggcccagagcatctgtgagcgggtcacccccaggctctcccatgccaactccgctgtggtgctctctgctgtgaaggtgctgatgaagttcatggagatgttgtctaaggacttggactactacggcacactgctcaagaagctggccccacccctggtcacactgctgtcagccgagccagagctgcagtatgtggccctgcgcaacatcaatctcatcgtgcagaaaaggcctgagatcctgaagcatgagatgaaggtgttcttcgtgaagtacaacgaccctatctacgtgaagctggagaagctggacatcatgatccgcctggcctctcaggccaacatcgcccaggtgttggcagagctgaaagagtacgcaacagaagtggatgtggactttgtacggaaggctgtgcgtgctattggccgctgcgccatcaaggtggagcaatctgcggagcgctgtgtgagcacgctgctcgacctcatccagaccaaggtcaactatgtggtccaggaggccatcgtggtcatcaaggacatcttccgcaagtaccccaacaagtatgagagtgtgattgccacactgtgtgagaatctggactccctggatgagcctgaggcccgggctgccatgatctggattgtgggcgagtacgcggaacggatcgacaacgcagatgagctgctggagagcttcctcgagggcttccatgacgagagcacacaggtccagctgcagctgctgacagccattgtgaaactctttctaaagaagccaacagagacccaggagctggtgcagcaggtcctcagtttggccactcaggactcagataacccagacctgcgggaccgtggctacatctactggcgcctgctgtccacggacccggtggcagccaaggaggtggtgttggctgagaagccactcatctctgaagagacggacctcatcgagcccacactgttagacgagcttatctgctacatcggcacgctggcttccgtctaccataagcctcccagtgcctttgtggaggggggccggggcgtcgtgcacaagagcctgccacctcgcacggcctcgagtgagagcgcagagagccctgagacagcccctactggagcacctcctggggagcagccagatgtcatccccgcccagggcgacctgctgggtgacctcctcaacctggacctcggccccccagtgagcggcccacccctggccacctcctcggtgcagatgggagctgtggaccttcttggcggtggccttgacagcctgatgggggatgagcctgaagggattgggggcaccaacttcgtggcacctccaacagcagcagtaccagccaatcttggagcacccatcggcagtggcctgagtgacctctttgacctgaccagtggcgtgggcaccctgtcaggatcatatgtggcccccaaagcagtctggctcccagccatgaaggctaaggggctggagatctcaggcaccttcacccgccaggtgggctccatctccatggacctgcagctgaccaacaaggccttgcaggtcatgaccgactttgccatccagttcaaccgcaacagctttggcctggcccccgccacccccctccaggtccacgcgccactcagccccaaccagacagtggagatctccctgcctctcagcacggtgggctcggtcatgaagatggagcctctgaacaacctccaggtggccgtgaagaacaacatcgatgtcttctacttcagcaccttgtacccactgcacatcctctttgtggaggacgggaagatggaccggcagatgttcctggccacatggaaggatattcccaatgagaatgaggcccagttccagatcagagactgccccctcaatgcagaggctgcgagcagcaagctgcagagcagcaacatcttcactgtcgccaagaggaacgtggagggccaggacatgctctaccagtccctgaagctgaccaacggcatctgggtgctggcggagctgcggatccagccgggcaaccccagctgcacggacttagagctgtccctgaagtgtcgagcaccagaggtgtcccagcacgtgtaccaggcctacgagaccatcctcaagaactgagaccccggccagcgcccaccccagccttctgcccgccccatcgaggaggcccctcgggggcagcacatcttcctcctcgcaggagggaccaggcggggctccaggccactcagtgggctccctggtcctgatggcagaacccacccgatccctggggtagggcaccaccccctcctggggtgagagcgcagtgcactcccgtgctctgggacacccctgctcctgtggctgtgatgtggggttaagtgaggtggggaccaaaggaaacagagccagagcagccacagaagctgtgcctgaagggtgagtgtggagcttgcccctccggctcacagccccggcagcccctggctccttggtctctccggttggtgttaaagggccctccactgccacctctcatgggatggaccctgccaacctggcctgggtgtgcagggaggggttccccttggtaccaggagagctgctcacttagggcctggggctcaaggagctgtaggtgccggcagaggggcagagctaggctgggaggagcccagggcctgcaccacccacttgcaaccaccaggctggtgccctgcagctgtgccagttgggccacagcctcccgagtgctgacccacatggtcaagaccaggcagaagctcccagagcccctgtctcgggctccccaccgactggcagctgcactatccccaactccccacttctgccccaagggtggtcactgcctgtgatacattcctcagtgtcgcctctgagcccaggcctcctgccacaaagactgggccgagagatggggctgggtaagcgggtgcgcctcctgtttgggtttcttcggggtttctctgtagtgtctgctgccctcctcctggcctcccaggtttcagttgtgtctgacagagcattaggttttcctgttactgctgtgtaataataaagaaagattcggcttttggcaatcacggacacttttttcccctccaccgaatgtcaggattgaaagctgcctccgagtggttggggatggttttctgaccctacggtaactagatctaatatatatcatcagaaaatatatattgtatgtttactcttattttcagaaagagaaaatgaataaaaatgatgacatcaa

SEQ ID NO: 451 - protein, 949 aa, Homo sapiens
MTDSKYFTTTKKGEIFELKAELNSDKKEKKKEAVKKVIASMTVGKDVSALFPDVVNCMQTDNLELKKLVYLYLMNYAKSQPDMAIMAVNTFVKDCEDPNPLIRALAVRTMGCIRVDKITEYLCEPLRKCLKDEDPYVRKTAAVCVAKLHDINAQLVEDQGFLDTLKDLISDSNPMVVANAVAALSEIAESHPSSNLLDLNPQSINKLLTALNECTEWGQIFILDCLANYMPKDDREAQSICERVTPRLSHANSAVVLSAVKVLMKFMEMLSKDLDYYGTLLKKLAPPLVTLLSAEPELQYVALRNINLIVQKRPEILKHEMKVFFVKYNDPIYVKLEKLDIMIRLASQANIAQVLAELKEYATEVDVDFVRKAVRAIGRCAIKVEQSAERCVSTLLDLIQTKVNYVVQEAIVVIKDIFRKYPNKYESVIATLCENLDSLDEPEARAAMIWIVGEYAERIDNADELLESFLEGFHDESTQVQLQLLTAIVKLFLKKPTETQELVQQVLSLATQDSDNPDLRDRGYIYWRLLSTDPVAAKEVVLAEKPLISEETDLIEPTLLDELICYIGTLASVYHKPPSAFVEGGRGVVHKSLPPRTASSESAESPETAPTGAPPGEQPDVIPAQGDLLGDLLNLDLGPPVSGPPLATSSVQMGAVDLLGGGLDSLMGDEPEGIGGTNFVAPPTAAVPANLGAPIGSGLSDLFDLTSGVGTLSGSYVAPKAVWLPAMKAKGLEISGTFTRQVGSISMDLQLTNKALQVMTDFAIQFNRNSFGLAPAAPLQVHAPLSPNQTVEISLPLSTVGSVMKMEPLNNLQVAVKNNIDVFYFSTLYPLHILFVEDGKMDRQMFLATWKDIPNENEAQFQIRDCPLNAEAASSKLQSSNIFTVAKRNVEGQDMLYQSLKLTNGIWVLAELRIQPGNPSCTDLELSLKCRAPEVSQHVYQAYETILKN

SEQ ID NO: 452 - DNA, 1124 bp, Homo sapiens
aaatgcacaacccggacggaagtgcctctccgacagcagatccaggctcggagctccagacgctgggacaggccgcccgcagaccacccccgccgcgcgcgggacacgacgccccccgcaggacacgcccatcagcccggaaacccctgagctgcttctcccggaggccgatgcccacccgggagcccccaaagactcgcggctcccgggggcacctgcatactcacccgcctgggcctgggcccccgctgcagggactggcgccccgaggcctcaaaaccagcgccccccgccctccgtgccagccccagccgggaccccacaaggcaaagaccaagaagattgtgtttgaggatgagttgctctcccaggccctcctgggcgccaagaagcctattggagccatccctaaggggcataagcctaggccccacccagtgcccgactatgagcttaagtacccgccagtgagcagtgagagggaacggagccgctatgtcgcagtgttccaggaccagtacggagagttcttggagctccagcacgaggtggggtgtgcacaggcaaagctcaggcagctggaggccctgctgagctccctgcccccaccccaaagccagaaggaggcccaagttgcagcccgggtttggagggagtttgagatgaagcgaatggatcctggcttcctggacaagcaggctcgctgccactacctgaagggtaaactgaggcatctcaagactcagatccagaaattcgatgaccaaggagacagcgagggctccgtgtacttctaagtgcccctgcagatgggcagagggatgcatggggatgcaggtcccttgcatttcttggtatctctcagcttttcctcttgcagctccccctaccaggggtcgctttctcctggattgcaaatgcctcttcagtttggactcagctctgacagcccctcctccaggaaggccttccaggacttcctcctctgggtcctctagctctgaccctacagggactccagatctcaacctgttccctggaagtagggcctgctctccatcccagtgaaataaacatgtattagacacctaaaaaaaaaaaaaaaaaaaaaaaaaaaaaaaaaa

SEQ ID NO: 453 - protein, 264 aa, Homo sapiens
MHNPDGSASPTADPGSELQTLGQAARRPPPPRAGHDAPRRTRPSARKPLSCFSRRPMPTREPPKTRGSRGHLHTHPPGPGPPLQGLAPRGLKTSAPRPPCQPQPGPHKAKTKKIVFEDELLSQALLGAKKPIGAIPKGHKPRPHPVPDYELKYPPVSSERERSRYVAVFQDQYGEFLELQHEVGCAQAKLRQLEALLSSLPPPQSQKEAQVAARVWREFEMKRMDPGFLDKQARCHYLKGKLRHLKTQIQKFDDQGDSEGSVYF

SEQ ID NO: 454 - DNA, 1916 bp, Homo sapiens
acttctgacagtggggaaagcagctgtgtgtgatagcttggaaggtttactgctgcctcaagtcctcttctctgcagttgaggtttcaggtttcaatcctcccaataccacaagacagagcacggggcggctgccgcctccgcctccgcgccttaacctaggcggcttgccgaagatctcagccccgcggccgcgcgctcgccctgccctagaccagggttgggcgcagcggcggaggtggcttctgggctgcgcgagctgggagagctgggaggcggcgatcgcagctgggccgggacttccttcctccaccgcacggcaacaaaacaaccctgcggcaggcactgagtgcttcgcagctgtctgggcgagaggcacagcgatgggctccgtgctgagcaccgacagcggcaaatcggcgcccgcctctgccaccgcgcgggccctggagcgcaggagggacccggagttgcccgtcacgtccttcgactgcgccgtgtgccttgaggtgttacaccagcctgtccggacccgctgcggccacgtattctgccgttcctgtattgctaccagtctgaagaacaacaagtggacctgtccttattgccgggcatatcttccttcagaaggagttccagcaactgatgtagccaaaagaatgaaatcagagtataagaactgcgctgagtgtgacaccctggtttgcctcagtgaaatgagggcacatattcggacttgtcagaagtacatagataagtatggaccactacaagaacttgaggagacagcagcaaggtgtgtatgtcccttttgtcagagggaactgtatgaagacagcttgctggatcattgtattactcatcacagatcggaacggaggcctgtgttctgtccactttgccgtttaatacccgatgagaatccaagcagcttcagcggcaatttaataagacatctgcaagttagtcacactttgttttatgatgatttcatagattttaatataattgaggaagctcttatccgaagagtcttagaccggtcacttcttgaatatgtgaatcactcgaacaccacataattttattaaaacgaagggaaaagggaccactgaattgcaccatttaagatgctgcttgaacaaatgggagggaagttgtcaatgattgatgggcaaaaatgtacaacacagttatgtgtttgtccatgtttattgttatagtgcatttaaaaactgctttaattttaatggtttaaatctgttttacatccttgagattcttacacatctaacaacaaaaaaaattatctacatcagtcattgttacatggaaaagacaggtggtaggcaagtaggtggaggatctcggtttgcaaattagataatactctgtgtataatgctacatatcaataactaccatcatggttaggcacgataactaatctttgttctgtgtaaaaaaatatggagagtgaaacaaagtgcagacattcaaagaaataagaaatctgctccaatgctcttgttctaatctctaataggttaacgttaataatcttgtatgggagttggaaaggaaaattttggaagtcaagaaagtccatttaggccggacgcggtggcttacgcttgtagtcccagcactttgggaggctgaggcaggcggatcacagggtcgggagttcgagaccagcctggccaacactggtctctgtgaaactccgtctctactgaaaatgcaaagattggctggacgtgttggcgggcatctgtgataccagctacttgggaggctgaggcagaagaatcgcttgagcccgggaggcggaggttgcagtgagctgagatcgcgccagtacactccagcctgggtaacagagctagactccatctcaaaaaaaaaaaaaaaaaaa

SEQ ID NO: 455 - protein, 232 aa, Homo sapiens
MGSVLSTDSGKSAPASATARALERRRDPELPVTSFDCAVCLEVLHQPVRTRCGHVFCRSCIATSLKNNKWTCPYCRAYLPSEGVPATDVAKRMKSEYKNCAECDTLVCLSEMRAHIRTCQKYIDKYGPLQELEETAARCVCPFCQRELYEDSLLDHCITHHRSERRPVFCPLCRLIPDENPSSFSGNLIRHLQVSHTLFYDDFIDFNIIEEALIRRVLDRSLLEYVNHSNTT

SEQ ID NO: 456 - DNA, 1142 bp, Homo sapiens
gccgccagcggctttctcggacgccttgcccagcgggccgcccgaccccctgcaccatggaccccgctcgccccctggggctgtcgattctgctgcttttcctgacggaggctgcactgggcgatgctgctcaggagccaacaggaaataacgcggagatctgtctcctgcccctagactacggaccctgccgggccctacttctccgttactactacgacaggtacacgcagagctgccgccagttcctgtacgggggctgcgagggcaacgccaacaatttctacacctgggaggcttgcgacgatgcttgctggaggatagaaaaagttcccaaagtttgccggctgcaagtgagtgtggacgaccagtgtgaggggtccacagaaaagtatttctttaatctaagttccatgacatgtgaaaaattcttttccggtgggtgtcaccggaaccggattgagaacaggtttccagatgaagctacttgtatgggcttctgcgcaccaaagaaaattccatcattttgctacagtccaaaagatgagggactgtgctctgccaatgtgactcgctattattttaatccaagatacagaacctgtgatgctttcacctatactggctgtggagggaatgacaataactttgttagcagggaggattgcaaacgtgcatgtgcaaaagctttgaaaaagaaaaagaagatgccaaagcttcgctttgccagtagaatccggaaaattcggaagaagcaattttaaacattcttaatatgtcatcttgtttgtctttatggcttatttgcctttatggttgtatctgaagaataatatgacagcatgaggaaacaaatcattggtgatttattcaccagtttttattaatacaagtcactttttcaaaaatttggatttttttatatataactagctgctattcaaatgtgagtctaccatttttaatttatggttcaactgtttgtgagacgaattcttgcaatgcataagatataaaagcaaatatgactcactcatttcttggggtcgtattcctgatttcagaagaggatcataactgaaacaacataagacaatataatcatgtgcttttaacatatttgagaataaaaaggactagcc

SEQ ID NO: 457 - protein, 235 aa, Homo sapiens
MDPARPLGLSILLLFLTEAALGDAAQEPTGNNAEICLLPLDYGPCRALLLRYYYDRYTQSCRQFLYGGCEGNANNFYTWEACDDACWRIEKVPKVCRLQVSVDDQCEGSTEKYFFNLSSMTCEKFFSGGCHRNRIENRFPDEATCMGFCAPKKIPSFCYSPKDEGLCSANVTRYYFNPRYRTCDAFTYTGCGGNDNNFVSREDCKRACAKALKKKKKMPKLRFASRIRKIRKKQF

SEQ ID NO: 458 - DNA, 1098 bp, Homo sapiens
atgtcagccccactggatgccgccctccacgcccttcaggaggagcaggccagaccgccctccacgcccttcaggaggagcaggccagactcaagatgaggctgtgggacctgcagcagctgagaaaggagctcggggactcccccaaagacaaggtcccattttcagtgcccaagatccccctggtattccgaggacacacccagcaggacccggaagtgcctaagtctttagtttccaatttgcggatccactgccctctgcttgcgggctctgctctgatcacctttgatgaccccaaagtggctgagcaggtgctgcaacaaaaggagcacacgatcaacatggaggagtgccggctgcgggtgcaggtccagcccttggagctgcccatggtcaccaccatccaggtgatggtgtccagccagttgagtggccggagggtgttggtcactggatttcctgccagcctcaggctgagtgaggaggagctgctggacaagctagagatcttctttggcaagactaggaacggaggtggcgatgtggacgttcgggagctactgccagggagtgtcatgctggggtttgctagggatggagtggctcagcgtctgtgccaaatcggccagttcacagtgccactgggtgggcagcaagtccctctgagagtctctccgtatgtgaatggggagatccagaaggctgagatcaggtcgcagccagttccccgctcggtactggtgctcaacattcctgatatcttggatggcccggagctgcatgacgtcctggagatccacttccagaagcccacccgcgggggcggggaggtagaggccctgacagtcgtaccccaaggacagcagggcctagcagtcttcacctctgagtcaggctaggggcctccccttctcatcctccccacccccccgccaaggttctcacactggcctgggcttgggtgcccatataggaggtctgtatgttcaccaacagtgcggaggggtcacacattgcaaaacactgcccagaacagtaaaaagagcctgcatgccaaaaaaaaaaaaaaaaaaaaaaaaaaaaaaaaaaaaaaaa

SEQ ID NO: 459 - DNA, 2745 bp, Homo sapiens
ggcacgagggcgaccgctccccggcgggagccagcgaaggtttccatgtcagaggccgatggagaactgaagattgccacctacgcacaaaggccattgagacacttcgtgtagctggaagacaccaacttcctgacaggagctttatttcatttgggatttcaagtttacagatggtatcttctcaaaagttggaaaaacctatagagatgggcagtagcgaaccccttcccatcgcagatggtgacaggaggaggaagaagaagcggaggggccgggccactgactccttgccaggaaagtttgaagatatgtacaagctgacctctgaattgcttggagagggagcctatgccaaagttcaaggtgccgtgagcctacagaatggcaaagagtatgccgtcaaaatcatcgagaaacaagcagggcacagtcggagtagggtgtttcgagaggtggagacgctgtatcagtgtcagggaaacaagaacattttggagctgattgagttctttgaagatgacacaaggttttacttggtctttgagaaattgcaaggaggttccatcttagcccacatccagaagcaaaagcacttcaatgagcgagaagccagccgagtggtgcgggacgttgctgctgcccttgacttcctgcataccaaagacaaagtctctctctgtcacctaggctggagtgctatggcgccatcagggctcactgcagccccaacctccctgggctccagtgatcctcccacctcagcctcccaagtagctgggactacaggcattgctcatcgtgatctgaaaccagaaaatatattgtgtgaatctccagaaaaggtgtctccagtgaaaatctgtgactttgacttgggcagtgggatgaaactgaacaactcctgtacccccataaccacaccagagctgaccaccccatgtggctctgcagaatacatggcccctgaggtagtggaggtcttcacggaccaggccacattctacgacaagcgctgtgacctgtggagcctgggcgtggtcctctacatcatgctgagtggctacccacccttcgtgggtcactgcggggccgactgtggctgggaccggggcgaggtctgcagggtgtgccagaacaagctgtttgaaagcatccaggaaggcaagtatgagtttcctgacaaggactgggcacacatctccagtgaagccaaagacctcatctccaagctcctggtgcgagatgcaaagcagagacttagcgccgcccaagttctgcagcacccatgggtgcaggggcaagctccagaaaagggactccccacgccgcaagtcctccagaggaacagcagcacaatggacctgacgctcttcgcagctgaggccatcgcccttaaccgccagctatctcagcacgaagagaacgaactagcagaggagccagaggcactagctgatggcctctgctccatgaagctttcccctccctgcaagtcacgcctggcccggagacgggccctggcccaggcaggccgtggtgaagacaggagcccgcccacagcactctgaaatgctccagtcacaccttataggccctaggcctggccaggcattgtcccctggaaacctgtgtggctaaagtctgctgagcaggcagcagcctctgctctgtggctccattcaggctttttcatctacgaaggccctgaggttcccatcaacccccatttccctagggtcctggaggaaaaagctttttccaaaggggttgtctttgaaaaggaaagcaatcacttctcactttgcataattgcctgcagcaggaacatctcttcactgggctccacctgctcacccgcctgcagatctgggatccagcctgctctcaccgctgtagctgtggcggctggggctgcagcctgcagggagaagcaagaagcatcagttgacagaggctgccgacacgtgcctcttccctctcttctctgtcaccctcctctggcggtccttccaccttcctctgtcctccggatgtcctctttgcccgtcttctcccttggctgagcaaagccatcccctcaattcagggaagggcaaggagccttcctcattcaggaaatcaaatcagtcttccggtctgcagcacggaaaagcacataatctttctttgctgtgactgaaatgtatccctcgtttatcatcccctttgtttgtgattgctgctaaagtcagtagtatcgtttttttaaaaaaaaagtttggtgtttttaaccatgctgttccagcaaagatgataccttaaactcccactgcaagcccatgaacttcccagagagtggaacggcttgctcttctttctagaatgtccatgcacttgggttttaatcagcagttccctattattctgattttaagctgttcctgtgatgaacttagagacagcatcggtgtctgctgctgtgtccccaggtcttgtgtgggtggcacagatctgggcagttagatagtgctctgtgcctaaggtgaagccacactagggtgaagcctcacttccctgtttgagcaatgcagtgcctgctgcccgtgtgcatgaaggtacagccattcagataagtggaactattgagttacataaagaaaatagatttgcatttgtcaggcagacgtttatacaacaccacggtgcttttatacattgtgcttattttaataaaactgaaattctaaaaaaaaaaaaaaaaaa

SEQ ID NO: 460 - protein, 465 aa, Homo sapiens
MVSSQKLEKPIEMGSSEPLPIADGDRRRKKKRRGRATDSLPGKFEDMYKLTSELLGEGAYAKVQGAVSLQNGKEYAVKIIEKQAGHSRSRVFREVETLYQCQGNKNILELIEFFEDDTRFYLVFEKLQGGSILAHIQKQKHFNEREASRVVRDVAAALDFLHTKDKVSLCHLGWSAMAPSGLTAAPTSLGSSDPPTSASQVAGTTGIAHRDLKPENILCESPEKVSPVKICDFDLGSGMKLNNSCTPITTPELTTPCGSAEYMAPEVVEVFTDQATFYDKRCDLWSLGVVLYIMLSGYPPFVGHCGADCGWDRGEVCRVCQNKLFESIQEGKYEFPDKDWAHISSEAKDLISKLLVRDAKQRLSAAQVLQHPWVQGQAPEKGLPTPQVLQRNSSTMDLTLFAAEAIALNRQLSQHEENELAEEPEALADGLCSMKLSPPCKSRLARRRALAQAGRGEDRSPPTAL

SEQ ID NO: 461 - DNA, 2206 bp, Homo sapiens
ctagtctttcagccttcaggctgtttttggcttgaagctctcttggcctcctagtttctacctaatcatgtccctggtggaggccatcagcctctggaatgaaggggtgctggcagcggacaagaaggactggaagggagccctggatgccttcagtgccgtccaggacccccactcccggatttgcttcaacattggctgcatgtacactatcctgaagaacatgactgaagcagagaaggcctttaccagaagcattaaccgagacaagcacttggcagtggcttacttccaacgagggatgctctactaccagacagagaaatatgatttggctatcaaagaccttaaagaagccttgattcagcttcgagggaaccagctgatagactataagatcctggggctccagttcaagctgtttgcctgtgaggtgttatataacattgctttcatgtatgccaagaaggaggaatggaaaaaagctgaagaacagttagcattggccacgagcatgaagtctgagcccagacattccaaaatcgacaaggcgatggagtgtgtctggaagcagaagctatatgagccagtggtgatccctgtgggcaagctgtttcgaccaaatgagagacaagtggctcagctggccaagaaggattacctaggcaaggcgacggtcgtggcatctgtggtggatcaagacagtttctctgggtttgcccctctgcaaccacaggcagctgagcctccacccagaccgaaaaccccagagatcttcagggctctggaaggggaggctcaccgtgtgctatttgggtttgtgcctgagacaaaagaagagctccaggtcatgccagggaacattgtctttgtcttgaagaagggcaatgataactgggccacggtcatgttcaacgggcagaaggggcttgttccctgcaactaccttgaaccagttgagttgcggatccaccctcagcagcagccccaggaggaaagctctccgcagtccgacatcccagctcctcctagttccaaagcccctggaaaaccccagctgtcaccaggccagaaacaaaaagaagagcctaaggaagtgaagctcagtgttcccatgccctacacactcaaggtgcactacaagtacacggtagtcatgaagactcagcccgggctcccctacagccaggtccgggacatggtgtctaagaaactggagctccggctggaacacactaagctgagctatcggcctcgggacagcaatgagctggtgcccctttcagaagacagcatgaaggatgcctggggccaggtgaaaaactactgcctgactctgtggtgtgagaacacagtgggtgaccaaggctttccagatgaacccaaggaaagtgaaaaagctgatgctaataaccagacaacagaacctcagcttaagaaaggcagccaagtggaggcactcttcagttatgaggctacccaaccagaggacctggagtttcaggaaggggatataatcctggtgttatcaaaggtgaatgaagaatggctggaaggggagtgcaaagggaaggtgggcattttccccaaagtttttgttgaagactgcgcaactacagatttggaaagcactcggagagaagtctaggatgtttcacaaactacaaagctgaagaaaatgaagccctattacttgtttgtaagatttagcacccttctgctgtatactgtactgagacattacagtttggaagtgttaactatttattccctgttaaaatttaacctactagacaatgatgtgagtacccaggatgatttcctggggcacagtgggtgaggagatggggacaggtgaatggaggagttaggggagaggaaaagtggatggaagtgtctggaaagggcacgagagagtcttccaggtactgatcctgtttcttgctctgagtgctagctagccagctgtgttcacactgtaaacattcatcaagctgtacatttggtgcacttttctgtgtcataccacaataaaaaaaaacctatcatcatcttacaaaaacaagacacccaagtccaggcccaaggagtaagtacaaatattcctgtttctgaaccattactgtaattggctcttaaggcttgaagtaaccttataggttactcataaggcatatacaaataaacttgtttgttttcttttttc

SEQ ID NO: 462 - protein, 526 aa, Homo sapiens
MSLVEAISLWNEGVLAADKKDWKGALDAFSAVQDPHSRICFNIGCMYTILKNMTEAEKAFTRSINRDKHLAVAYFQRGMLYYQTEKYDLAIKDLKEALIQLRGNQLIDYKILGLQFKLFACEVLYNIAFMYAKKEEWKKAEEQLALATSMKSEPRHSKIDKAMECVWKQKLYEPVVIPVGKLFRPNERQVAQLAKKDYLGKATVVASVVDQDSFSGFAPLQPQAAEPPPRPKTPEIFRALEGEAHRVLFGFVPETKEELQVMPGNIVFVLKKGNDNWATVMFNGQKGLVPCNYLEPVELRIHPQQQPQEESSPQSDIPAPPSSKAPGKPQLSPGQKQKEEPKEVKLSVPMPYTLKVHYKYTVVMKTQPGLPYSQVRDMVSKKLELRLEHTKLSYRPRDSNELVPLSEDSMKDAWGQVKNYCLTLWCENTVGDQGFPDEPKESEKADANNQTTEPQLKKGSQVEALFSYEATQPEDLEFQEGDIILVLSKVNEEWLEGECKGKVGIFPKVFVEDCATTDLESTRREV

SEQ ID NO: 463 - DNA, 4977 bp, Homo sapiens
caagataccctccaggccctcatcaccttttttcaagtcaagatttcatcccatacatgcatgactcaatcagatttggaaatgtggatatgccctgtcgtccaagcccaatatagcccttcccctccaggttccagttatgcggtcgtcagacatacagctcggaatacaccacggagatcatgaaccccgactacaccaagctgaccatggaccttggcagcactgagatcacggctacagccaccacgtccctgcccagcatcagtacctttgtggagggctactcgagcaactacgaactcaagccttcctgcgtgtaccaaatgcagcggcccttgatcaaagtggaggaggggcgggcgcccagctaccatcaccatcaccaccaccaccaccaccaccaccaccatcaccagcagcagcatcagcagccatccattcctccagcctccagcccggaggacgaggtgctgcccagcacctccatgtacttcaagcagtccccaccgtccacccccaccacgccggccttccccccgcaggcgggggcgttatgggacgaggcactgccctcggcgcccggctgcatcgcacccggcccgctgctggacccgccgatgaaggcggtccccacggtggccggcgcgcgcttcccgctcttccacttcaagccctcgccgccgcatccccccgcgcccagcccggccggcggccaccacctcggctacgacccgacggccgctgccgcgctcagcctgccgctgggagccgcagccgccgcgggcagccaggccgccgcgcttgagggccacccgtacgggctgccgctggccaagagggcggccccgctggccttcccgcctctcggcctcacgccctcccctaccgcgtccagcctgctgggcgagagtcccagcctgccgtcgccgcccagcaggagctcgtcgtctggcgagggcacgtgtgccgtgtgcggggacaacgccgcctgccagcactacggcgtgcgaacctgcgagggctgcaagggctttttcaagagaacagtgcagaaaaatgcaaaatatgtttgcctggcaaataaaaactgcccagtagacaagagacgtcgaaaccgatgtcagtactgtcgatttcagaagtgtctcagtgttggaatggtaaaagaagttgtccgtacagatagtctgaaagggaggagaggtcgtctgccttccaaaccaaagagcccattacaacaggaaccttctcagccctctccaccttctcctccaatctgcatgatgaatgctcttgtccgagctttaacagactcaacacccagagatcttgattattccagatactgtcccactgaccaggctgctgcaggcacagatgctgagcatgtgcaacaattctacaacctcctgacagcctccattgatgtatccagaagctgggcagaaaagattccgggatttactgatctccccaaagaagatcagacattacttattgaatcagcctttttggagctgtttgtcctcagactttccatcaggtcaaacactgctgaagataagtttgtgttctgcaatggacttgtcctgcatcgacttcagtgccttcgtggatttggggagtggctcgactctattaaagacttttccttaaatttgcagagcctgaaccttgatatccaagccttagcctgcctgtcagcactgagcatgatcacagaaagacatgggttaaaagaaccaaagagagtcgaagagctatgcaacaagatcacaagcagtttaaaagaccaccagagtaagggacaggctctggagcccaccgagtccaaggtcctgggtgccctggtagaactgaggaagatctgcaccctgggcctccagcgcatcttctacctgaagctggaagacttggtgtctccaccttccatcattgacaagctcttcctggacaccctacctttctaatcaggagcagtggagcagtgagctgcctcctctcctagcacctgcttgctacgcagcaaagggataggtttggaaacctatcatttcctgtccttccttaagaggaaaagcagctcctgtagaaagcaaagactttcttttttttctggctcttttccttacaacctaaagccagaaaacttgcagagtattgtgttggggttgtgttttatatttaggcattgggggatggggtgggagggggttatagttcatgagggttttctaagaaattgctaacaaagcacttttggacaatgctatcccagcaggaaaaaaaaggataatataactgttttaaaactctttctggggaatccaattatagttgctttgtatttaaaaacaagaacagccaagggttgttcgccagggtaggatgtgtcttaaagattggtcccttgaaaatatgcttcctgtatcaaaggtacgtatgtggtgcaaacaaggcagaaacttccttttaatttccttcttcctttattttaacaaatggtgaaagatggaggattacctacaatcagacatggcaaaacaatatggctgtttgcttcataacagctgcaatttttaaagtgctgtcttactaagtcttgttatactctcttatctatatgccggaaataaaaaggaggcagtcatgttagcaaatgacacgttaatatccctagcagaggctgtgttcaccttccctgtcgatcccttctgaggtatggcccatccaagacttttaggccattcttgatggaaccagatccctgccctgactgtccagctatcctgaaagtggatcagattataaactggattacatgtaactgttttggttgtgttctatcaaccccaccagagttccctaaacttgcttcagttatagtaactgactggtatatcattcagaagcgccataagtcagttgagtattgatcctagataagaacatgcaatcagaggactggtcatacagggtaagcaccagggacaataaggatttttatagatataatttaatttttgttattggttaaggagacaattttggagagcaagcaaatcttctttttaaaaaatagtatgaatgtgaatactagaaaagatttaagaaatagtatgagtgtgagtcataggaaggattagtgggctgcgtttcaacattccgtgttcgtactcccttttgtatgtttctactgttaatgccatattactatgagataatttgttgcatagtgtccttatttgtataaacatttgtatgcacgttatattgtaatagctttgcctgtatttattgcaagaccaccagctcctggaagctgagttacagagtaattaaatggggtgttcacagtgacttggatacaccaattagaaattaaataagcaaatatatatatatatatataaatatagcaggttacatatatatatttataatgtgtctttttattaaccatttgtacaataaatgtcacttcccatgccgttattttatggttcatttgcagtgacttttaaggcagtactgtttagcactttgatattaaaattttgcttatgttttgctaaattcgaataatgtttgaagatttttaggtctaaaagtctttatattatatacgctgtatcaagtcaaaatatctttggccattttgctaagaaacaaactttgaatgtcaaactgatgtcacagtagtttttgttagctttaaatcatttttgctttagtctttttaaaggaaaataacaaaactatgctgtttatattgcattaattatacaatcaaacaaatgccaaatgaattgcctaattgcgcaagataacccagataggaaatcatatgtttttttccaagagtcattctaatatttgattatgttatgtgtgcttttatgaaagattgttatttttatatatcaagatgatagaacctggaatgttaggattttgaaatgttagacttggaaggggcctggtctgtcaactagtccaaccccttaaaattcatagaggacgaaactggggcccaattgaagggtgaagagttactcaaggtcaaacagctggtaacagaatcaagactaagacctaatttacctttccatactctttttttttctcaacttcatctatataaaatcaggcttttaaacataaccactaatatttacctgaagataaccatgagtaaagtatacttttgcattaattttttgagtatatgcaaacataataaatattattaaatatcaaggaaagctaacatttcatacaagatagcttcagaccaaattcaaattgaatttgaataaattagaaatactgtgcatacataaccttcttgtgcaccatgagtatttggaaagttaatccttgtttttgtcgtgtctatagagaacaaacaaataaaaacagagccctagagaaatggcgttactttttatttttacacccatcagatttaaggaaaagactttttagccattataatctagtggttggaaggaatgaagaagcttttttagtaataggtccagatatgagtgctaaaaataaagatgatagcatgttcttctgtcttccatagttattacaactatgagagcctcccaagtcatcttatcaactcaacccccttttttttgtcttaatgttgcacataagtttatacagagtggatgaccacactagcacagaagagaacaacatgtattaaagcaggtgattcctcccttggcgggagagctctctcagtgtgaacatgccttctgtgggcggaaatcaggaagccaccagctgttaatggagagtgccttgcttttatttcagacagcagagttttccaaagtttctctgctcctctaacagcattgctctttagtgtgtgttaacctgtggtttgaaagaaatgctcttgtacattaacaatgtaaatttaaatgattaaattacattttatcaatggca

SEQ ID NO: 464 - protein, 587 aa, Homo sapiens
MDLGSTEITATATTSLPSISTFVEGYSSNYELKPSCVYQMQRPLIKVEEGRAPSYHHHHHHHHHHHHHHQQQHQQPSIPPASSPEDEVLPSTSMYFKQSPPSTPTTPAFPPQAGALWDEALPSAPGCIAPGPLLDPPMKAVPTVAGARFPLFHFKPSPPHPPAPSPAGGHHLGYDPTAAAALSLPLGAAAAAGSQAAALEGHPYGLPLAKRAAPLAFPPLGLTPSPTASSLLGESPSLPSPPSRSSSSGEGTCAVCGDNAACQHYGVRTCEGCKGFFKRTVQKNAKYVCLANKNCPVDKRRRNRCQYCRFQKCLSVGMVKEVVRTDSLKGRRGRLPSKPKSPLQQEPSQPSPPSPPICMMNALVRALTDSTPRDLDYSRYCPTDQAAAGTDAEHVQQFYNLLTASIDVSRSWAEKIPGFTDLPKEDQTLLIESAFLELFVLRLSIRSNTAEDKFVFCNGLVLHRLQCLRGFGEWLDSIKDFSLNLQSLNLDIQALACLSALSMITERHGLKEPKRVEELCNKITSSLKDHQSKGQALEPTESKVLGALVELRKICTLGLQRIFYLKLEDLVSPPSIIDKLFLDTLPF

SEQ ID NO: 465 - DNA, 2810 bp, Homo sapiens
gccagaaagcattctttcattttactctgtattcatgctattgaaagttgcttctgtcagaggaaacaaacactgtgattgaggaaatattgatgaattttaaatgacaaggaaattgccacattgacagaattttggtccatctatttaaagatgattttttgaaaagatatgcataagactcatattctgacaagtttcacagaacaattcagaggttattaccaagaggatcccactgaaatcatcagcctgcctttttaaaagaaaaatattgtttagtgaaataataaatatgaagctctgatttttagcaaagaattgtgagtgtttactggattttcttctttgctttttagctgtatgacaaaattaacacaaagtcttcaccacaaatcaggaatcctccaagcgatgcagtacagagagccaaagaggtattggaagaaatttcatgttaccctgagaataacgacgcaaaggaactaaagcgtattttaacacaacctcatttcatggccttacttcagactcacgacgtagtggcacatgaagtttacagtgatgaagcattgagggtcacacctcctcccacctctccctatttaaacggcgattctccagaaagtgctaacggaggcatggatatggagaatgtgaccagagttcggctggtacagtttcaaaagaacacagatgaaccaatgggaatcactttaaaaatgaatgaactaaatcattgtattgttgcaagaattatgcatgggggcatgattcacaggcaaggtacacttcatgttggtgatgaaattcgagaaatcaatggcatcagtgtggctaaccaaacagtggaacaactgcaaaaaatgcttagggaaatgcgggggagtattaccttcaagattgtgccaagttaccgcactcagtcttcgtcctgtgaggacttgccatcaactacccaaccaaaaggacgacagatctatgtaagagcacaatttgaatatgatccagccaaggatgacctcatcccctgtaaagaagctggcattcgattcagagttggtgacatcatccagattattagtaaggatgatcataattggtggcagggtaaactggaaaactccaaaaatggaactgcaggtctcattccttctcctgaacttcaggaatggcgagtagcttgcattgccatggagaagaccaaacaggagcagcaggccagctgtacttggtttggcaagaaaaagaagcagtacaaagataaatatttggcaaagcacaatgcagtgtttgatcaattagatcttgtcacatatgaagaagtagtaaaactgccagcattcaagaggaaaacactagtcttattaggcgcacatggtgttgggagaagacacataaaaaacactctcatcacaaagcacccagaccggtttgcgtaccctattccacatacaaccagacctccaaagaaagacgaagaaaatggaaagaattattactttgtatctcatgaccaaatgatgcaagacatctctaataacgagtacttggagtacggcagccacgaggatgcgatgtatgggacaaaactggagaccatccggaagatccacgagcaggggctgattgcaatactggacgtggagcctcaggcactgaaggtcctgagaactgcagagtttgctccttttgttgttttcattgctgcaccaactattactccaggtttaaatgaggatgaatctcttcagcgtctgcagaaggagtctgacatcttacagagaacatatgcacactacttcgatctcacaattatcaacaatgaaattgatgagacaatcagacatctggaggaagctgttgagctcgtgtgcacagccccacagtgggtccctgtctcctgggtctattaggcctctccccagatatctgagcataactgggagcacctcatttgtggaaaagcctctttgttatcggccttgtgtcagcaggtcatggtccctagagactacctagttgtagtgtgacctacatttataattattgtcatgtccgaatagataggaggagaaaaacaattacacactaatttaaagagacagtatcttttttaatcagttctcctaaactttaataaaatgtatctttaaatgtatgtattattcaatcctttggaatgttatatttttggaaatcatagctttttatttccaaggcccctaaaaactgcacaaaatagatgctgctttctataatctattttaataataataaacaatgattctgttaccttgactgggggtggaacactacattctttttagagtctgattttatggattggaatattgggatatctttctttcctttatttatttgaaataattagtgtagtgattacaaaacagtcataaatttttaaaggccttttttctctcttttttttttttttagaatagtatttttttttaagtcctttatgtaacatccagataatgtgatactgtctctttgaagcaccctgtaaaccttttagagatttgaagttgggtcttgactcttaatgcatgtggacagtcgcgagcgtttatgctgtcggtgtgtctgtgttggacaaaacaatctgtaatctacagcaaagtacattctacattccgttcatggggcacacccaggggaataagaataaaatgctattatgactaagttgtaaacctatgcacatcccttgcattttgggcaactttataaaaaaaaagaaactgatttttattaataataatcatgtagtgaaatgtgtttgt

SEQ ID NO: 466 - protein, 518 aa, Homo sapiens
LYDKINTKSSPQIRNPPSDAVQRAKEVLEEISCYPENNDAKELKRILTQPHFMALLQTHDVVAHEVYSDEALRVTPPPTSPYLNGDSPESANGGMDMENVTRVRLVQFQKNTDEPMGITLKMNELNHCIVARIMHGGMIHRQGTLHVGDEIREINGISVANQTVEQLQKMLREMRGSITFKIVPSYRTQSSSCEDLPSTTQPKGRQIYVRAQFEYDPAKDDLIPCKEAGIRFRVGDIIQIISKDDHNWWQGKLENSKNGTAGLIPSPELQEWRVACIAMEKTKQEQQASCTWFGKKKKQYKDKYLAKHNAVFDQLDLVTYEEVVKLPAFKRKTLVLLGAHGVGRRHIKNTLITKHPDRFAYPIPHTTRPPKKDEENGKNYYFVSHDQMMQDISNNEYLEYGSHEDAMYGTKLETIRKIHEQGLIAILDVEPQALKVLRTAEFAPFVVFIAAPTITPGLNEDESLQRLQKESDILQRTYAHYFDLTIINNEIDETIRHLEEAVELVCTAPQWVPVSWVY

SEQ ID NO: 467 - DNA, 2234 bp, Homo sapiens
ggcacgaggccgtgttggtcaggctggtctcaaactcctgacctcaggtgatccgcccgcctcagcctcccaaagtgctgagattacaggtgtgagctaccgcaccccgccgaggttagcactttcatcaccaaagaccccgtgcctctcgtggtcctttgagggatcccgccgccaccacccttgtattttatcacgtgctcttcagggcatgtggaattcgttgagtttgcttttagagccaagtttctttccctgtgtgggtttttgaggaaaacctgaggtcccctaatctgtggccaccaccccccccccgccgccacgccttagagcagagcagcccctcctctcatttggtgcagaaacagtcaagaggaaccattggcctagagctcctgtgaccgagagcgccacggaagcctggggatgatgtcgggcagctttattctttgcttggctttggtaactaggtggtcccctcaagcatcctcagttcctcttgctgtttatgaatctaagacaaggaagtcctatagaagccaaagggacagggacggaaaggacaggtcccaagggatggggctgtctttacttgtggaaaccaggaaattgctcctctcagccaaccaaggttgaccacacaccacccttccggagcagctcagtcagccctcggggacgagaaaccacaagcgcagagacgctgaggcccaggcaggtgaagaggaagtggctttgggtttttaaagtaggtgagcgtgagcctctctgactgcttcttccccgggggggactgcaaaccgctcagggttgcggcagagccatggacttccggtccctgcaacgggtgacctaagcgtggtgcacccatcagtcacgcaggaggactgacttgacagacgaaagacaagcccggatgacacagggtgagaagagtcagggccgcacctctgtccctgcaaaccaacaggtgcatggtgagtgtggcagtccccacagctccacaatgggctcccccgccaacggggacgacagggatcttcaggaacttctgacctcaccaagtcaagtggaccactctccactccacgaggatgtgaaacggttctttaaaatgggattttagagcctcgggaatgcatgtgcgtcgcatctttcatattatgggtcaggatagattcatttcttgcaacatagtggaaaagatataagctgcagtaatttgctctttgaatgaccgtcacccccagtataggatatgcttgtatccccccgtcactcctccgcctgttttttaaacttttccaccacctgcgtccaaaaagaatgttatagcgagtgctcttaaatgttgaacctgggtgttgcttccgggccagtctgcgtggctccatgaaaagctcactgctgccccagccgggcttcttagaggaggtcagttgtcctatgtatcatcatttactctgggaatcctactgtgaaatcatgtctgtatttttctggagcagttcacatagagtagaatgtggaatttcccgtgaacgtctccttcctcccccgtatctgccgcctgtcacttcgccaccgtgctagaatactgttgtgttgtaagatgactaattttaaaagaacctgccctgaaaagttcttagaaacgcaatgaaagggaggaacttgtcctttacccagtttttcctttgtaggatgggaaagtataaaaaggcacagaaggttgtcatgggctgttccttgggggtttttatcctgctcaccgtggagataagcctgcggcttgtctaaccagcgcagcgcaaaggtctcaatgccttttggtaacatccgtcattgcagaagaaagtttacacgacgtcaaaaagtgacgttcatgctaagtgtttttccagaaatattggtttcatgtttcttattggctctgcctcctgtgcttatatcatccaaaaactttttaaaaaggtccagaattctattttaacctgatgttgagcacctttaaaacgttcgtatgtgtgttgcactaattctaaactttggaggcattttgctgtgtgaggccgatcgccactgtaaaggtcctagagttgcctgtttgtctctggagatggaattaaaccaaataaagagcttccactggaggcttgtattgaccttgtaactatatgttaatctcgtgttaaaataaaatataacttgtgaaaaaaaaaaaaaaaaaaaaa

SEQ ID NO: 468 - protein, 69 aa, Homo sapiens [sequence omitted]

SEQ ID NO: 469 - DNA, 4508 bp, Homo sapiens
  Unsure 1973,1984,2116,2119-2121,2134,2160,2180,3170,3172,3198,3209-3211: Unknown base
gacccaagtacgtcagggctccacggtactgttttctttcctcctaggaagatgggatttccttttgtccaagcactgaaggaaccgacccaaaccagtcttgggggctctgataagatttcagactctggacccttttccatcaggcagtgtctctgctgtatcatcccagttttgcagaggtacttgcaagccatctgacctctctcttttttttccttcagtgctggagggcagttatctcagggttccaatttatccattaataccaaccaaaacatcagcatcaagtccgaaccgatttcacctcctcgggatcgtatgaccccatcgggcttccagcagcagcagcagcagcagcagcagcagccgccgccaccaccgcagccccagccacaacccccgcagccccagccccgacaggaaatggggcgctcccctgtggacagtctgagcagctctagtagctcctatgatggcagtgatcgggaggatccacggggcgacttccattctccaattgtgcttggccgacccccaaacactgaggacagagaaagcccttctgtaaagcgaatgaggatggacgcgtgggtgacctaaggcttccaagctgatgtttgtacttttgtgttactgcagtgacctgccctacatatctaaatcggtaaataaggacatgagttaaatatatttatatgtacatacatatatatatccctttacatatatatgtatgtgggtgtgagtgtgtgtgtatgtgtgggtgtgtgttacatacacagaatcaggcacttacctgcaaactccttgtaggtctgcagatgtgtgtcccatggcagacaaagcaccctgtaggcacagacaagtctggcacttccttggactacttgtttcgtaaagataaccagtttttgcagagaaacgtgtacccatatataattctcccacactagcttgcagaaacctagagggccccctacttgttttatttaactgtgcagtgactgtagttacttaagagaaaatgctttgtagaacagagcagtagaaaagcaggaaccaagaaagcaatactgtacataaaatgtcatttatattttccaacctggcatgggtgtctgttgcaaaggggtgcatgggaaagggctgttgatattaaaaacaaacaaaacaaaaaagccccacacataactgttttgcacgtgcaaaaatgtattgggtcaagaagtgatctttagctaataaagaaagagaatagaaaacacgcatgagatattcagaaaatactagcctagaaatatagagcattaacaaagtaaaattaatatattaagttataattggaatatgtcagaagtttctttttacattcatatcttaaaaattaaagaaactgattttagctcatgtatattttatatgaaagaaaacacccttatgaattgatgactatatataaaattatattcactacttttgaacacattctgctatgaattatttatataagccaaagctatatgttgtaacttttttttagagaatagctttatcttggtttaactctttagttttattttaagaggggaaaacaaaaatatcttgcaagcagaaccttgaaaaaaaaaaagccatgaacacttattctaaatgtaaattaaaagttgagccaaactctttgtgtatatagcatcttaaatatattatcacctttgatgtaagtacctatgtattgtatggtcaccagattaaaaagtatatttttgtggattgccgccaatctggggggaaaaggcgaggtcctttattaagtattcactgtctaatatttactattttggtaaatatactgtactttggattttaattattaggccagtgttttcagaggattgtattaaggggtttctcccctcactggtgggggaatgtgtgatggttacaatggaatcttcggggctgtttgggtnggagcatcaanatattttttgggttgtggtcaataaattggaaaggggcaaaaaaaattgggggttaagtccaacccgaataagaataaaatgtgtttgtaacaagatttaataagccattatttaaaacttcccttttgtgnggnnnaaatgtagaaganaaacctgacctaatttaattaatatnagagaaaatgccaaaatagnagatgagcccaaaggtttaataagtggtaaatgattaggggaaaataatcatggggaaagggatcttttttccttgaccctctgaaaacagaacgatgcagctggttacaaaatcctaccgttatcagctcttctgcacattgcagtgatgctttggtatgcggggagaaacactcttagggtgccggtccttggcatgactcttgccattctaattggaattagtgccaccctcagcttggattttgaacaagccttattctttcaggaagacaactaatggatgatagcaagttcatccacttactgggcttgtgccatgagcaaaattcaaagtcctgtatatctttcattgtagatttttaaatactccttttcctaaaaaactcaagggtttaaaaattgctattttatattttaaatgatattgagcagctacctacaatttctatgtacattttgttccccccccaccaccacccccaaattacgttccttttgacattttcctcatctgctgtttgtgacaagtcatcagccagatttcctgactgacacataggtatgatcagtgcaggagagacctgcgcaccacaggctgcaaactggaggttctgttctcatggcaggttgggcagtaacttttgagagaggccaaaaaaaggaggatgacatgctgtctcctctcttcagatagacattaggctcttattcagaaaggatttttctttaaaaatgtacttactttactgaactacttacaggcacatttcttcataaggccacacctaatccaaacaagacagtctcccaacactgaagttccaaaataatccttaccactttgtaaaccatttatagctttgaaagtgttaagtgattccttcgttattatttatgcatgttcatgaacttctgctggacattggaataggagttaacacattcacatttactgtctattttcttgggtgccttatgagatggccncnctgacagtactccaatagtctttctngctacgcaggnnnataatcagcacaactactgctttctagaatactactactcaaggctcggcgttgggtttaaattacactgcaccaggtaacaatgaactccatttcaggaactgaatatttgactgttaacctttttcccatacgtccagtgtggcatggagcatatggacttgacagacatctctcacccagacgcccacgtgtgaacacacccacatccacatctctgggtggaaaccagcctagagaggggacgacgctaatggtgttgctttagaaccgtcttttcttacccttttagactcgtgttttgtgtgagacaccattgcaagaaaattttatccctccagaagtattttattactaaagaacaaaagcaaaaaaagcttaaattgcactggttaaagtacagtttccaacagctgtccttcctcagtactctaatggccactccaccgcgagtggaagtcactgttgtgtgtacacaggtggtcccaatcaaaacttcatcttgtgagcccaattatgtccattttgttatagactaaatcaggggtttgttctacaagaacaatacatgttttaccctttcctttaactagaaggataactagtaatgcatcaacataatttctgtattaaccatcatgcgcacaagaaatacataggaaataaggaagaagaaaactcctggcatcggatcttaagctagatgattagaatgtgaaaaagattttacaaatgtaaaacttctatttctctgtagaaactttcttcactttgctgtgcaagaagacactgctttgctatattcaaaatggcttttcttacaagagatttatgtatttggtaaatgtttgtagtcaacagttcacacaagaagctgtacacggtttgatcatgtaaaaccgtttggcggcacaagctggactttgttgccatccttgagatgaaccttttaagaaaaataagttaatctcaatttttccctgaatgtgttgtttttcttcattatacaataaatataatagtgaactttttatcaaatggtgaagacaatgctaaaggttgttgcaaactgtttgtctcccgcactcactccagtaaagacggactggctcttcctgtgcgtcgagactctgtcacgtttgcctggggacacaaggcgctggctttgccaccaggcagccccttcccctaaagccctctcctttttcattcctttcacgaagaccttcttcacccgcaggcttctttctctgggttgagacagggccaaggaaaccgtcccaacgccccactgggc

SEQ ID NO: 470 - DNA, 5181 bp, Homo sapiens
ggggtgtgtcaagaattaatttcggaattggttggtgacaagtgatgctgacttactcaatagcacgtatgtgcatgttgataacccaccgagaagccgaggaggcaaggctcgcgagagttcagggaggccgccctgagattccggcgaggccgcgggtcccacctcccgggggcggggcgagggcggagcggggagaagggagctgacgggcgcccggccggctgcggtccgtgcggaggctgagccggccgcgggcgcgaccggaggcagtttccgttactatggcaatgacggcagggactacaacaacctttcctatgagcaaccatacccgggaaagagtgactgtagccaagctcacattggagaatttttatagcaacctaattttacagcatgaagagagagaaaccaggcagaagaaattagaagtggccatggaagaagaaggattagcagatgaagagaaaaagttacgtcgatcacaacacgctcgcaaagaaacagagttcttacggctcaaaaggaccagacttggcttggatgactttgagtctctgaaagttataggaagaggagcttttggagaggtgcggttggtccagaagaaagatacaggccatatctatgcaatgaagatattgagaaagtctgatatgcttgaaaaagagcaggtggcccatatccgagcagaaagagatattttggtagaagcagatggtgcctgggtggtgaagatgttttacagttttcaggataagaggaatctttatctaatcatggaatttctccctggaggtgacatgatgacattgctaatgaagaaagacaccttgacagaagaggaaacacagttctacatttcagagactgttctggcaatagatgcgatccaccagttgggtttcatccatcgggatattaagccagacaaccttttattggatgccaagggtcatgtaaaattatctgattttggtttatgtacgggattaaagaaagctcacaggactgaattttatagaaatctcacacacaacccaccaagtgacttctcatttcagaacatgaactcaaagaggaaagcagaaacttggaagaagaacaggagacaactggcatattccacagttgggacaccagattacattgctccagaagtattcatgcagactggttacaacaaattgtgtgactggtggtctttgggagtgattatgtatgaaatgctaataggatatccacctttctgctctgaaacacctcaagaaacatacagaaaagtgatgaactggaaagaaactctggtatttcctccagaggtacctatatctgagaaagccaaggacttaattctcagattttgtattgattctgaaaacagaattggaaatagtggagtagaagaaataaaaggtcatcccttttttgaaggtgtcgactgggagcacataagggaaaggccagcagcaatccctatagaaatcaaaagcattgatgatacttcaaattttgatgacttccctgaatctgatattttacaaccagtgccaaataccacagaaccggactacaaatccaaagactgggtttttctcaattatacctataaaaggtttgaagggttgactcaacgtggctctatccccacctacatgaaagctgggaagttatgaatgaagataacattcacccataaccaagagaactcaggtagctgcatcaccaggcttgcttggcgtagataacaatacactgaaatactcctgaagatggtggtgcttattgactacaagaggaaattctacaggattaggatttctaagactactataggaattggttggcagtgccagctggctcttttttttaatattttattatttttgttaactttattatatgaaggtactggaataaaaggaacagacatccctttctaactgcactgcctacatgcgtattaaggtccattctgcctgtgtgtgctgtggctttgaactgtaacacctctaatcaattcaggagaaacacatatcatttaaagcaacataggctaacctgtaggtaacactgcagtattgatgttttactgcaaatcttatgggtctagataatcagtaaaagccatcttccatagttggtgttagaacattgccctattggtttggacatctgtagaatatatatgaagacaatttctgtaatggttttaagagatttaaaaagaaattcactggttctttacaaaatagaatttatcatcaagttattacacaaacttcacagtaaggagtgacaagtttataataaggaagacaaagtttaacaccttcactcaagcactccactaatatatttacgttgcattcagaaatactgatgaccttcatatacgtagtctgtatactcatagggagatgtactgtattatataacatgtaaagttgattttcttgtgacaagagaacttctttttttaacaagaggacatggcattattttaatttgattatggtgagttgaatttaagacatgaccatgaaggctgcttgtagaattagtgtatttttattaaactatttttttaaatgtcaaacttctatcatgtaaatggacttatagagaacaaaaagctatttactttggttttctagaaagttgttacatatcatggctggttaacttttatttcttttgatgaaaatttttcctttgatagtacttgtattattgtgccattattttcttatgctccaaatgtaccaaagatcttgaacagagtggatgttcacaactgagtagaattttcctttcctgtgggcatgctgtattcagacctgacagatctttgatagaggtcagcttattaaagggcaatattgttcttgtttagctacatcactgtggtgaatatagatggaattaaggaagtaaatgcaggccagggggttgtgatgagaggataggggagataatatcagcatcaaattctttgggtatctctctaagaattaaataatcttttctagcttaatattttaattctaattcaaacaactctgaggttttggtttcattagtaatagttgaggaataatatactagcaaagaatggcctaatgtttgtcataactgttaatggatgaaattttttaaagatacaaccatgataaccattataaatgatctatgatcaaaatctaaagtgatgaattatttgtaggaatgtcttcctaatggggaagaattgcataggagcattatgcaaatctacacaagcttttataaatgttgctgctgggtagctccacagtgtttcataaggccatcctgtttcccccaactcccccatttttggtttgtttctttttaaatatttgttgagtacttacgtgtttatctaacagttcacttccatttttctagtctggattttttgagtatttaggaaagagagctattaaaaactctggggatttctcaatgtgactaactctaatttttctaattataactgcctttaattaacataatattaacttttgctgaggtttatgagattttctcaccccacatcgctcccctttttttaaaaaggactgttttgctagtgtgataatgaataggtaagatatgagataattgcaacattgtctagttctagtatggtaactattcttgaaatggtattgaaaaataccgttaattcaaattgacagagattgataaaaagaaactgatttacctaagtttactttttaattgcataatagagcattttttgttttgagttccctcattcttattaccagaaagagcttgcaaatagttttactttcttggcactggaagggtagttctggaaagctactttgttgagagtctcattcttccctggagttaatagagtgattcacaatctttggggttttctcctcatcaaaagcatttcttaagtgcctatctaaaagcaattaaagactgtgtctgccctttagaagctaagaatttgattcatgatgcaaattaactagataatttgcaaagtacccttgagattgaattttctctattatatatttcccatatttcaggtgaataatttaatttaaatgacaaaaccctatctagtcaactgggcataatgacattttctttaaattagactctattttgaattaaaagagttttattataaaccgtgtgtttttggtttttctaagtatatagaaagcttgtataattcagatttatcaatttcctgatttaatgtagactttgacttttttattaaaaacctttgtattaaagcaagttatgttatttttcttttatgcatttattactaacatagctttaaatctttaaatgtattgaagcattgtgctgtctgaaaataaggaattgcttataaaccagccacttctgaatacaatatgtagctgatttaataagctagttagtgaatggaaaataagtgtggagtattaaaaatgttctttggttggtaaggcctaagatagggtttcatttatttctatactttttctgttttttaaacacctgcatatttttatgtaaatctctaaatttaaaatattttaagtacatttatttttggtgttttattgtataaaaccttagacaatcaatcagtcagtctttactgacaggagcagcagctatctgtcttttgctgatctacaaataaatgaattgagaatttagtccatagaggtccctggctaccaaacacattctcctttgaattgttaaaattcagaacattcaaaataactgttttgctacaacccatgattattttcctgttgtgtttatttaaatttactttctctttagaagtgcacttatttctgaaaaatcttaatgaaacaaacgcttagaacaaatataaatatgagacacttgggactactagagatattttagatttttatgaaaaaaatgtgaggggatattgctgctttaaaaaggaataaagtaataaaaatatatctcagctatttttttaaagcaatataattcagcaattgtctagaaaagtaatcatgaggctactgagtttggtgttcagttactgagtttcaaaaatgttttggtggcatgaggacaaaatttcattgaaggtaagataagaataaaaactatgtttac

SEQ ID NO: 471 - DNA, 7368 bp, Homo sapiens
  Unsure 38,64: Unknown base
cggcgaaggagggcgaggaggaaacggtgccggagcgngcagggcttgctgccggcaacggcgntgcacaggctgccggagcgagcctgccgcgcgccgcccttcccgctctccttactgggcgagctgcggggatggggcggccgcgggagcccgagcgcgcgcaggaaccgccgccgccgccgcccgcgtctccgttgccgcgcgcctgagccgccgtcgccgccgcgcgccctgcccgggggcggcccccccagccccatggaggtctcccggaggaaggcgccgccgcgccccccgcgccccgcagcgccactgcccctgctcgcctatctgctggcactggcggctcccggccggggcgcggacgagcccgtgtggcggtcggagcaagccatcggagccatcgcggcgagccaggaggacggcgtgtttgtggcgagcggcagctgcctggaccagctggactacagcctggagcacagcctctcgcgcctgtaccgggaccaagcgggcaactgcacagagccggtctcgctggcgccccccgcgcggccccggcccgggagcagcttcagcaagctgctgctgccctaccgcgagggggcggccggcctcggggggctgctgctcaccggctggaccttcgaccggggcgcctgcgaggtgcggcccctgggcaacctgagccgcaactccctgcgcaacggcaccgaggtggtgtcgtgccacccgcagggctcgacggccggcgtggtgtaccgcgcgggccggaacaaccgctggtacctggcggtggccgccacctacgtgctgcctgagccggagacggcgagccgctgcaaccccgcggcatccgaccacgacacggccatcgcgctcaaggacacggaggggcgcagcctggccacgcaggagctggggcgcctcaagctgtgcgagggcgcgggcagcctgcacttcgtggacgcctttctctggaacggcagcatctacttcccctactacccctacaactatacgagcggcgctgccaccggctggcccagcatggcgcgcatcgcgcagagcaccgaggtgctgttccagggccaggcatccctcgactgcggccacggccaccccgacggccgccgcctgctcctctcctccagcctagtggaggccctggacgtctgggcgggagtgttcagcgcggccgctggagagggccaggagcggcgctcccccaccaccacggcgctctgcctcttcagaatgagtgagatccaggcgcgcgccaagagggtcagctgggacttcaagacggccgagagccactgcaaagaaggggatcaacctgaaagagtccaaccaatcgcatcatctaccttgatccattccgacctgacatccgtttatggcaccgtggtaatgaacaggactgttttattcttggggactggagatggccagttacttaaggttattcttggtgagaatttgacttcaaattgtccagaggttatctatgaaattaaagaagagacacctgttttctacaaactcgttcctgatcctgtgaagaatatctacatttatctaacagctgggaaagaggtgaggagaattcgtgttgcaaactgcaataaacataaatcctgttcggagtgtttaacagccacagaccctcactgcggttggtgccattcgctacaaaggtgcacttttcaaggagattgtgtacattcagagaacttagaaaactggctggatatttcgtctggagcaaaaaagtgccctaaaattcagataattcgaagcagtaaagaaaagactacagtgactatggtgggaagcttctctccaagacactcaaagtgcatggtgaagaatgtggactctagcagggagctctgccagaataaaagtcagcccaaccggacctgcacctgtagcatcccaaccagagcaacctacaaagatgtttcagttgtcaacgtgatgttctccttcggttcttggaatttatcagacagattcaactttaccaactgctcatcattaaaagaatgcccagcatgcgtagaaactggctgcgcgtggtgtaaaagtgcaagaaggtgtatccaccccttcacagcttgcgacccttctgattatgagagaaaccaggaacagtgtccagtggctgtcgagaagacatcaggaggaggaagacccaaggagaacaaggggaacagaaccaaccaggctttacaggtcttctacattaagtccattgagccacagaaagtatcgacattagggaaaagcaacgtgatagtaacgggagcaaactttacccgggcatcgaacatcacaatgatcctgaaaggaaccagtacctgtgataaggatgtgatacaggttagccatgtgctaaatgacacccacatgaaattctctcttccatcaagccggaaagaaatgaaggatgtgtgtatccagtttgatggtgggaactgctcttctgtgggatccttatcctacattgctctgccacattgttcccttatatttcctgctaccacctggatcagtggtggtcaaaatataaccatgatgggcagaaattttgatgtaattgacaacttaatcatttcacatgaattaaaaggaaacataaatgtctctgaatattgtgtggcgacttactgcgggtttttagcccccagtttaaagagttcaaaagtgcgcacgaatgtcactgtgaagctgagagtacaagacacctacttggattgtggaaccctgcagtatcgggaggaccccagattcacggggtatcgggtggaatccgaggtggacacagaactggaagtgaaaattcaaaaagaaaatgacaacttcaacatttccaaaaaagacattgaaattactctcttccatggggaaaatgggcaattaaattgcagttttgaaaatattactagaaatcaagatcttaccaccatcctttgcaaaattaaaggcatcaagactgcaagcaccattgccaactcttctaagaaagttcgggtcaagctgggaaacctggagctctacgtcgagcaggagtcagttccttccacgtggtattttctgattgtgctccctgtcttgctagtgattgtcatttttgcggccgtgggggtgaccaggcacaaatcgaaggagctgagtcgcaaacagagtcaacaactagaattgctggaaagcgagctccggaaagagatacgtgacggctttgctgagctgcagatggataaattggatgtggttgatagttttggaactgttcccttccttgactacaaacattttgctctgagaactttcttccctgagtcaggtggcttcacccacatcttcactgaagatatgcataacagagacgccaacgacaagaatgaaagtctcacagctttggatgccctaatctgtaataaaagctttcttgttactgtcatccacacccttgaaaagcagaagaacttttctgtgaaggacaggtgtctgtttgcctccttcctaaccattgcactgcaaaccaagctggtctacctgaccagcatcctagaggtgctgaccagggacttgatggaacagtgtagtaacatgcagccgaaactcatgctgagacgcacggagtccgtcgtcgaaaaactcctcacaaactggatgtccgtctgcctttctggatttctccgggagactgtcggagagcccttctatttgctggtgacgactctgaaccagaaaattaacaagggtcccgtggatgtaatcacttgcaaagccctgtacacacttaatgaagactggctgttgtggcaggttccggaattcagtactgtggcattaaacgtcgtctttgaaaaaatcccggaaaacgagagtgcagatgtctgtcggaatatttcagtcaatgttctcgactgtgacaccattggccaagccaaagaaaagattttccaagcattcttaagcaaaaatggctctccttatggacttcagcttaatgaaattggtcttgagcttcaaatgggcacacgacagaaagaacttctggacatcgacagttcctccgtgattcttgaagatggaatcaccaagctaaacaccattggccactatgagatatcaaatggatccactataaaagtctttaagaagatagcaaattttacttcagatgtggagtactcggatgaccactgccatttgattttaccagattcggaagcattccaagatgtgcaaggaaagagacatcgagggaagcacaagttcaaagtaaaagaaatgtatctgacaaagctgctgtcgaccaaggtggcaattcattctgtgcttgaaaaactttttagaagcatttggagtttacccaacagcagagctccatttgctataaaatacttttttgactttttggacgcccaggctgaaaacaaaaaaatcacagatcctgacgtcgtacatatttggaaaacaaacagccttcctcttcgcttctgggtaaacatcctgaagaaccctcagtttgtctttgacattaagaagacaccacatatagacggctgtttgtcagtgattgcccaggcattcatggatgcattttctctcacagagcagcaactagggaaggaagcaccaactaataagcttctctatgccaaggatatcccaacctacaaagaagaagtaaaatcttattacaaagcaatcagggatttgcctccattgtcatcctcagaaatggaagaatttttaactcaggaatctaagaaacatgaaaatgaatttaatgaagaagtggccttgacagaaatttacaaatacatcgtaaaatattttgatgagattctaaataaactagaaagagaacgagggctggaagaagctcagaaacaactcttgcatgtaaaagtcttatttgatgaaaagaagaaatgcaagtggatgtaagcactctggggcctggcttaatctggcaaagttcttcagacgacttgggagcaaaatggctgcttgagctactctgtgtcgttaatttgttgtttgcacataggttccactttgggcactgtctttttaagagaccaaggcacatgcacagcttttagaaagcataccaacccttgtgcctgtgtgtataccgtgggaacccttctgtaaatagagttgaagtggttgttgcaaacagcctccttgtttacagagaatacaaggccagtaagcgaatgtcagtattgtaactacagtctccacttaagcacaatgatataagtggttttgtttgaaaactacagctatgtagcacttgtgctacactgcacctctgcattgtaaagggatactgccagtgctcaaaacaaaatgtgaaatgagtcatttggaaacaaggtgggggtgttagggcaacctcgaggatttgcagcattgaaactttccccagtagttcttggaaaagctgaccgcagaatttggtagtgtacacttagcatttgtgagtgtgtgtgtgtgtttaaaccaaaaactaacagtgttgcaacattgttgaaagggctcgtgtttttcagtggtcatcaactgcactccatcaaactcacctccatttcaccaaggagctctaaagtaaggagagtgggctttatttaaatgaacagcattttaaccagatactttgtcctaatgtatgttccttttcttcatctgttttttcatactaaatgtatttgatagtggacatgttggatattatacaaaaaaatcattaattcatttctgttccaaaacctttgatcagaacgatctgtggaagagtaactccatttctatatgagtgagtgtctccttgctttagatttctggtgaaccctgtggttatgaatacttgtgtgtgatttaaaaaaaaaaagatacattttacatttcatcgaattgctgttcacactggagtattatatataaatactatatatttgaggcccaaggcctgaaaaatattagtatacaacttggtatcttagtcttactatgtactttttgaaagtattcctcgcaggagaaagaatttaaaatacccattttattcatgcctttctttttaaagaattctctatccagttatactgtagtctttttagtgctgattttttaattcctgaatttttgctgctcatgaccagttttaataccactgtgttttccttctattaaaccagaagaagtaaacagcataattggcaactcttgagcttttcttgtggcaggcaccttttacccttggtgctccaaatcccccatctaggaaagaaaattttttcaagtcaaataacattgatcacatattccttgaaatcatttaccaacactgtatggagcattaggatttaaatatgaatttgtcttaaaggcaattcctttttgcttctgtattatctggaaaagcatgagagaggtgacacctcaacaaactgatcagagaaaataagcagttactaccctgataggcaccttcccaatcctgttgcttttgaccattgtctgtccaacggacacacctcaaacaaacaaaactaccaaatagatgacagatcagaataaaggtgagaggtctggtccccattgaaggctgctacagtcttcaaagaggtgaaggagttcataagagaacaacagtaggaaagttgagagccaagggtaggagagttgcccaaaagacttcccctactactttagggtactgaaaactcaaaggatcagctacagctttatctaagtatttactaaatgctacatgagggtgtccctgtccagctttctggcacatgagtcctgtgtggagagttacctcctcttccagggactgtgctgttgggaactttgggcaagtcacttacctctttgtgcctcaatttctgtataataatatttctaagctacctcactgaggtggtatgaagattcactaatgtatgtagcgtgtttgtcaatcctccagtgaaaagcactatctagatcacattttggatcacattagccaaatgcagtaaatggccaaattagatgtgtgctgaagacaatcagtcactgggtctatattaaacagcaaccagagcaacaaatggcaaacaatttctattttcaagtttctttgcatatttttttggtgcaaaaccatttataaacttttttttctaacactagtgtctacagcagcattcaaaaaaattctgttaccttttctgtattaggatttaaagtctatttcttattgtatacctgattgaagctgttcttggagatgaatgttttaaatgtctatatccaaaaaataaacattttgatgtaactgtgaaaaaa

SEQ ID NO: 472 - protein, 1655 aa, Homo sapiens
  Unsure 13,22: Unknown amino acid
RRRRARRKRCRSXQGLLPATAXHRLPERACRAPPFPLSLLGELRGWGGRGSPSARRNRRRRRPRLRCRAPEPPSPPRALPGGGPPSPMEVSRRKAPPRPPRPAAPLPLLAYLLALAAPGRGADEPVWRSEQAIGAIAASQEDGVFVASGSCLDQLDYSLEHSLSRLYRDQAGNCTEPVSLAPPARPRPGSSFSKLLLPYREGAAGLGGLLLTGWTFDRGACEVRPLGNLSRNSLRNGTEVVSCHPQGSTAGVVYRAGRNNRWYLAVAATYVLPEPETASRCNPAASDHDTAIALKDTEGRSLATQELGRLKLCEGAGSLHFVDAFLWNGSIYFPYYPYNYTSGAATGWPSMARIAQSTEVLFQGQASLDCGHGHPDGRRLLLSSSLVEALDVWAGVFSAAAGEGQERRSPTTTALCLFRMSEIQARAKRVSWDFKTAESHCKEGDQPERVQPIASSTLIHSDLTSVYGTVVMNRTVLFLGTGDGQLLKVILGENLTSNCPEVIYEIKEETPVFYKLVPDPVKNIYIYLTAGKEVRRIRVANCNKHKSCSECLTATDPHCGWCHSLQRCTFQGDCVHSENLENWLDISSGAKKCPKIQIIRSSKEKTTVTMVGSFSPRHSKCMVKNVDSSRELCQNKSQPNRTCTCSIPTRATYKDVSVVNVMFSFGSWNLSDRFNFTNCSSLKECPACVETGCAWCKSARRCIHPFTACDPSDYERNQEQCPVAVEKTSGGGRPKENKGNRTNQALQVFYIKSIEPQKVSTLGKSNVIVTGANFTRASNITMILKGTSTCDKDVIQVSHVLNDTHMKFSLPSSRKEMKDVCIQFDGGNCSSVGSLSYIALPHCSLIFPATTWISGGQNITMMGRNFDVIDNLIISHELKGNINVSEYCVATYCGFLAPSLKSSKVRTNVTVKLRVQDTYLDCGTLQYREDPRFTGYRVESEVDTELEVKIQKENDNFNISKKDIEITLFHGENGQLNCSFENITRNQDLTTILCKIKGIKTASTIANSSKKVRVKLGNLELYVEQESVPSTWYFLIVLPVLLVIVIFAAVGVTRHKSKELSRKQSQQLELLESELRKEIRDGFAELQMDKLDVVDSFGTVPFLDYKHFALRTFFPESGGFTHIFTEDMHNRDANDKNESLTALDALICNKSFLVTVIHTLEKQKNFSVKDRCLFASFLTIALQTKLVYLTSILEVLTRDLMEQCSNMQPKLMLRRTESVVEKLLTNWMSVCLSGFLRETVGEPFYLLVTTLNQKINKGPVDVITCKALYTLNEDWLLWQVPEFSTVALNVVFEKIPENESADVCRNISVNVLDCDTIGQAKEKIFQAFLSKNGSPYGLQLNEIGLELQMGTRQKELLDIDSSSVILEDGITKLNTIGHYEISNGSTIKVFKKIANFTSDVEYSDDHCHLILPDSEAFQDVQGKRHRGKHKFKVKEMYLTKLLSTKVAIHSVLEKLFRSIWSLPNSRAPFAIKYFFDFLDAQAENKKITDPDVVHIWKTNSLPLRFWVNILKNPQFVFDIKKTPHIDGCLSVIAQAFMDAFSLTEQQLGKEAPTNKLLYAKDIPTYKEEVKSYYKAIRDLPPLSSSEMEEFLTQESKKHENEFNEEVALTEIYKYIVKYFDEILNKLERERGLEEAQKQLLHVKVLFDEKKKCKWM

SEQ ID NO: 473 - DNA, 2308 bp, Homo sapiens
ttagagacgagttttttttttttttctattacttttccccccccctaactaacggactattattgttgttgttttaaatttagctcttagggcttagctatttgggttttcttgcggtgtccggctcccgtctccctggctcccccgcccgccctgcggccccagcgcccctcgctctcatccagcccgcgaggagtgcgggcgccgcgccgcctttaaagcgaggccagggagcgaggcggtgaccggccgagatccggccctcgcctcctccctcggtggcgctagggctcccggcctctcttcctcagtgcgggcggagaagcgaaagcggatcgtcctcggctgccgccgccttctccgggactcgcgcgcccctccccgcgcgcccacccacccagtccggctggactgcggcagccgcgcggctcaccccggcaggatgttcgcagccgggctggctcccttctacgcctccaacttcagcctctggtcggccgcttactgctcctcggccggcccaggcggctgctccttccccttggaccccgccgccgtcaaaaagccctccttctgcatcgcagacattctgcacgccggcgtgggggatctgggggcggccccggagggcctggcaggggcctcggccgccgccctcaccgcgcacttgggctcggttcacccgcacgcctctttccaagcggcggccagatccccgcttcgacccaccccagtggtggcgccctccgaagtcccggctggcttcccgcagcggctgtctccgctctcagccgcctaccaccaccatcacccgcaacaacaacagcagcagcaacagccgcagcagcaacagcctccgcctccgccccgggctggcgccctgcagcccccggcctcggggacgcgagtggttccgaacccccaccacagtggctctgccccggccccctccagcaaagacctcaaatttggaattgaccgcattttatctgcagaatttgacccaaaagtcaaagaaggcaacacgctgagagatctcacttccctgctaaccggtgggcggcccgccggggtgcacctctcaggcctgcagccctcggccggccagttcttcgcatctctagatcccattaacgaggcttctgcaatcctgagtcccttaaactcgaacccaagaaattcagttcagcatcagttccaagacacgtttccaggtccctatgctgtgctcacgaaggacaccatgccgcagacgtacaaaaggaagcgttcatggtcgcgcgctgtgttctccaacctgcagaggaaaggcctggagaaaaggtttgagattcagaagtacgtgaccaagccggaccgaaagcagctggcggcgatgctgggcctcacggacgcacaggtgaaggtgtggttccagaaccggcggatgaagtggcggcactccaaggaggcccaggcccaaaaggacaaggacaaggaggctggcgagaagccatcaggtggagccccggctgcggatggcgagcaggacgagaggagccccagccgttctgaaggcgaggctgagagcgagagcagcgactccgagtccctggacatggcccccagcgacacggagcggactgaggggagtgagcgttctctgcaccaaacaacagttattaaggccccggtcactggcgccctcattaccgccagcagtgctgggagtggtgggagcagcggcggcggcggcaatagtttcagcttcagcagcgccagcagtcttagtagcagcagcaccagtgcgggttgcgccagcagccttggcggcggcggcgcctcggagcttctccctgcaacacagcccacagccagcagcgctcccaaaagccccgagccagcccaaggcgcgcttggctgcttatagactgtactagggcggaggggatccgggccttgcgtgcagcctcccaaccatgggctgggttttgtgcttactgtatgttggcgacttggtagggcaggagacgcagcgtggagcctacctcccgacattcacgcttcgccccacgctgctccgactggctgcagcggacactgcccaaagcagaggggagtctcagtgtcctgctagccagccgaacacttctctccggaagcaggctggttcgactgtgaggtgtttgactaaactgtttctctgactcgccccagaggtcgtggctcaaaggcacttaggacgccttaaatttgtaaataaaatgtttactacggttaaaaaaaaaaaaaaaaaaaaaaaaaaaaaaaaaaaaaaaaaaaaaaaaaa

SEQ ID NO: 474 - protein, 488 aa, Homo sapiens
MFAAGLAPFYASNFSLWSAAYCSSAGPGGCSFPLDPAAVKKPSFCIADILHAGVGDLGAAPEGLAGASAAALTAHLGSVHPHASFQAAARSPLRPTPVVAPSEVPAGFPQRLSPLSAAYHHHHPQQQQQQQQPQQQQPPPPPRAGALQPPASGTRVVPNPHHSGSAPAPSSKDLKFGIDRILSAEFDPKVKEGNTLRDLTSLLTGGRPAGVHLSGLQPSAGQFFASLDPINEASAILSPLNSNPRNSVQHQFQDTFPGPYAVLTKDTMPQTYKRKRSWSRAVFSNLQRKGLEKRFEIQKYVTKPDRKQLAAMLGLTDAQVKVWFQNRRMKWRHSKEAQAQKDKDKEAGEKPSGGAPAADGEQDERSPSRSEGEAESESSDSESLDMAPSDTERTEGSERSLHQTTVIKAPVTGALITASSAGSGGSSGGGGNSFSFSSASSLSSSSTSAGCASSLGGGGASELLPATQPTASSAPKSPEPAQGALGCL

SEQ ID NO: 475 - DNA, 2815 bp, Homo sapiens
gcccgccctcggctcctccgccgtgatgctgtcccgatcccgctgtgtgtctcgggcgttcagccgctcgctctccgccttccagaaggggaactgccctctagggagacgttccctgcctggggtctccttatgccagggaccaggttaccctaacagcaggaaggttgtcattaacaacagtgtcttcagtgttcgctttttcagaactacagctgtatgcaaggatgacttggttacagtcaaaaccccagcgtttgcagaatctgtcacagagggagatgtcaggtgggagaaagctgttggagacacagttgcagaagatgaagtggtttgtgagattgaaactgacaagacatctgtgcaggttccatcaccagcaaatggcgtgattgaagctcttttggtacctgatgggggaaaagtcgaaggaggcactccacttttcacactcaggaaaactggtgctgctcctgctaaggccaagccggctgaagctcctgctgctgcagccccaaaagcagaacctacagcagcggcagttcctccccctgcagcacccatacccactcagatgccaccggtgccctcgccctcacaacctccttctggcaaacctgtgtctgcagtaaaacccactgttgccccaccactagctgagccaggagctggcaaaggtctgcgttcagaacatcgggagaaaatgaacaggatgcggcagcgcattgctcagcgtctgaaggaggcccagaatacatgtgcaatgctgacaacttttaatgagattgacatgagtaacatccaggagatgagggctcggcacaaagaggcttttttgaagaaacataacctcaaactaggcttcatgtcggcatttgtgaaggcctcagcctttgccttgcaggaacagcctgttgtaaatgcagtgattgacgacacaaccaaagaggtggtgtatagggattatattgacatcagtgttgcagtggccaccccacggggtctggtggttccagtcatcaggaatgtggaagctatgaattttgcagatattgaacggaccatcactgaactgggagagaaggcccgaaagaatgaacttgccattgaagatatggatggcggtaccttcaccattagcaatggaggcgtttttggctcgctctttggaacacccattatcaacccccctcagtctgccatcctggggatgcatggcatctttgacaggccagtggctataggaggcaaggtagaggtgcggcccatgatgtacgtggcactgacctatgatcaccggctgattgatggcagagaggctgtgactttcctccgcaaaatcaaggcagcggtagaggatcccagagtcctcctcctggatctttaggaggaacccacacaccctacaagttgatcatgcaggaactgaaaaccagtcttctccctgtcccctcatgggtcccgggttagcctggtgacaggcagacacatgctgttggcctcaagcaaggaagcagagcactgtgtaaccagcagtcacaggtcttttcttggcgttcctgccaggctctccctctctgcacctgtctcatagcctcgaatatcttaattccttaggcttaagagagagagccttaatggatgctcattcatattcctgcctttcttccatcagctctctgcaaagatgattttgcttctccctagtgctggtatactatagagaaacccccggggaccatgtgattaagttcctatcttttgaaagtttgttctgcagagacttctaggaggatgctgtgcctcccaagctcagagcagcctctgtcctggctgtgcacattctcccttgattccacttgtgtggagggattgaacacaggcaaagaggtgctgctttgcttcttcaatggcaccttcattctccgttgtcattgacttcaagatgcctcttctacctcttccaggaagcacaggccaggggatctgggtgtgtgagtgggaggagagggcagaggtcccctgaggtcatgcattgtaatcatcatagaaggagagcccaggcctgccctcacgctctccatcataggctgacaccaagaagactcgtcttggcacaatctcacacagctggggctgtagcaaccctttccaacccctttgctggttgctgggcctcattctagcaccttgttcttagagcagattctagcacatcatggcagtgggaccaagcgtggtcccgaggaagggccagagcctggtagagactagggaagggaggtctcctctagactgactcacattgccttgagcttttcagttaagttgctgtaagcacctgggctgaggaggcagtttttgttccttcctgcgttatagcggggccttgtctcttcctctgcaggacacagatctggaggacgtggactggggtaggaaaccaccctgagggtgttagtacctagtggtgaaatggatgaggtcatttctaaggtgtgttgcccgtggatctgggcacaatcattggaattccttggagccactgggattcatggctttgtatccaactgcatccaggcctgaggctgctgacgtttgacaccagggccagtagagagtgcccttttgtatcttaagccaagaagtgaggcctgggggtgggggaggggggaaggggtgggagccaatactgagtgcctgcagcatctactactctgtcttcactattcagaacttgtaactaaagtatttaaagaaactgattttaaatgcaaattaaagggcagatattctcaaaaaaaaaaaaaaaaaa

SEQ ID NO: 476 - protein, 453 aa, Homo sapiens
MLSRSRCVSRAFSRSLSAFQKGNCPLGRRSLPGVSLCQGPGYPNSRKVVINNSVFSVRFFRTTAVCKDDLVTVKTPAFAESVTEGDVRWEKAVGDTVAEDEVVCEIETDKTSVQVPSPANGVIEALLVPDGGKVEGGTPLFTLRKTGAAPAKAKPAEAPAAAAPKAEPTAAAVPPPAAPIPTQMPPVPSPSQPPSGKPVSAVKPTVAPPLAEPGAGKGLRSEHREKMNRMRQRIAQRLKEAQNTCAMLTTFNEIDMSNIQEMRARHKEAFLKKHNLKLGFMSAFVKASAFALQEQPVVNAVIDDTTKEVVYRDYIDISVAVATPRGLVVPVIRNVEAMNFADIERTITELGEKARKNELAIEDMDGGTFTISNGGVFGSLFGTPIINPPQSAILGMHGIFDRPVAIGGKVEVRPMMYVALTYDHRLIDGREAVTFLRKIKAAVEDPRVLLLDL

SEQ ID NO: 477 - DNA, 1800 bp, Homo sapiens
atgggggagcagccgatcttcaccacccgagcgcatgtcttccagattgaccccaacaccaagaagaactggatgcctgcgagcaagcaggcggtcaccgtttcctacttctatgatgtcacaaggaacagctatcggatcatcagtgtggacggagccaaggtgatcataaacagcacaatcacaccgaatatgaccttcaccaaaacgtcacagaagtttgggcagtgggccgacagcagagccaacacagtgtttggtttggggttttcctctgagcagcagctgacaaagtttgcagagaaattccaggaggtgaaagaagctgccaagatagccaaagacaagacgcaggagaaaatcgagacctcaagtaatcattcccaagaatctgggcgtgaaaccccatcttctactcaggcatccagtgtcaacgggacggacgaggaaaaggcctctcacgccggtccagccaacacacaactgaagtctgagaatgacaagctgaagattgccttgacgcagagcgcagccaacgtgaagaagtgggagatcgagctgcagacccttcgggagagcaatgcacggctgaccacagcactgcaggagtcggcagccagtgtggagcagtggaagaggcagttctccatctgccgtgatgagaatgaccggctccgcaacaagattgatgagctggaagaacaatgcagtgagatcaacagagagaaggagaagaacacgcagctgaagaggaggatcgaggagctggaggcagagctccgagaaaaggagacagagctgaaagatctccgaaaacaaagtgaaatcatacctcagctcatgtcagagtgcgaatatgtctctgagaagctagaggcggcagagagagacaatcaaaacctggaagacaaagtgcgttccttaaagacagacattgaggagagcaaataccgacagcgccacctgaaggtggagttgaagagcttcctggaggtgctggacgggaagattgacgacctgcatgacttccgccgagggctctccaagctgggcaccgataactagggctggccgaggcccaggccccgcccgtgagtcccaagcgtgtgtgcgagaccagatagctctaggacgttcttctgtgtgcattgcttctgtaaatgcaggcgcagtttgtcgtgtttccaaaccagttgtgccgtccactcactccttttcagaatagaaatctcctctcgcttctctggccttgtgaggttgtggacaactggaagattctgactcaggaatccagaactaggtctaccttcaacatttatgcagtcagggcagggatgtttatatctttcataagggctgttgcaaccatatgaactgaaaaaacacgcattttgtaatccaaatattgatattctttacaccaagccatcaggctccttttatcaaatagcattcagagtatttgaatgtccaccagacaccagccccggggggcacagagagaacaacattcctctctgtcaacatcgagaggctttaaaacaactgtttagtggaaactttctgagagatggaaaacaagcttctggtgggtgcattttctggcccggagttgcctgcatccacgctactgccccctgccccccgcccccccagtttgtacggttgcaacagtgttccttttcttggttttaatttctgagcagatgatttgctgtgggaacagcacacagtgagggtgcctagcacaatgtctggcacaaagtaggtgcttaataaatatttgttcaattaaaaaaa

SEQ ID NO: 478 - protein, 354 aa, Homo sapiens
MGEQPIFTTRAHVFQIDPNTKKNWMPASKQAVTVSYFYDVTRNSYRIISVDGAKVIINSTITPNMTFTKTSQKFGQWADSRANTVFGLGFSSEQQLTKFAEKFQEVKEAAKIAKDKTQEKIETSSNHSQESGRETPSSTQASSVNGTDEEKASHAGPANTQLKSENDKLKIALTQSAANVKKWEIELQTLRESNARLTTALQESAASVEQWKRQFSICRDENDRLRNKIDELEEQCSEINREKEKNTQLKRRIEELEAELREKETELKDLRKQSEIIPQLMSECEYVSEKLEAAERDNQNLEDKVRSLKTDIEESKYRQRHLKVELKSFLEVLDGKIDDLHDFRRGLSKLGTDN

SEQ ID NO: 479 - DNA, 1048 bp, Homo sapiens
ccccgcacgaaaccgagttctggagaacgccatcagctcgctgcttaaaattaaaccacaggttccattatgggtcgacttgatgggaaagtcatcatcctgacggccgctgctcaggggattggccaagcagctgccttagcttttgcaagagaaggtgccaaagtcatagccacagacattaatgagtccaaacttcaggaactggaaaagtacccgggtattcaaactcgtgtccttgatgtcacaaagaagaaacaaattgatcagtttgccaatgaagttgagagacttgatgttctctttaatgttgctggttttgtccatcatggaactgtcctggattgtgaggagaaagactgggacttctcgatgaatctcaatgtgcgcagcatgtacctgatgatcaaggcattccttcctaaaatgcttgctcagaaatctggcaatattatcaacatgtcttctgtggcttccagcgtcaaaggagttgtgaacagatgtgtgtacagcacaaccaaggcagccgtgattggcctcacaaaatctgtggctgcagatttcatccagcagggcatcaggtgcaactgtgtgtgcccaggaacagttgatacgccatctctacaagaaagaatacaagccagaggaaatcctgaagaggcacggaatgatttcctgaagagacaaaagacgggaagattcgcaactgcagaagaaatagccatgctctgcgtgtatttggcttctgatgaatctgcttatgtaactggtaaccctgtcatcattgatggaggctggagcttgtgattttaggatctccatggtgggaaggaaggcaggcccttcctatccacagtgaacctggttacgaagaaaactcaccaatcatctccttcctgttaatcacatgttaatgaaaataagctctttttaatgatgtcactgtttgcaagagtctgattctttaagtatattaatctctttgtaatctcttctgaaatcattgtaaagaaataaaaatattgaactcataaaaaaaaaaaaaaaa

SEQ ID NO: 480 - protein, 245 aa, Homo sapiens
MGRLDGKVIILTAAAQGIGQAAALAFAREGAKVIATDINESKLQELEKYPGIQTRVLDVTKKKQIDQFANEVERLDVLFNVAGFVHHGTVLDCEEKDWDFSMNLNVRSMYLMIKAFLPKMLAQKSGNIINMSSVASSVKGVVNRCVYSTTKAAVIGLTKSVAADFIQQGIRCNCVCPGTVDTPSLQERIQARGNPEEARNDFLKRQKTGRFATAEEIAMLCVYLASDESAYVTGNPVIIDGGWSL

SEQ ID NO: 481 - DNA, 6270 bp, Homo sapiens
gccctgcttccccttgcacctgcgccgggcggccatggacttgtacagcaccccggccgctgcgctggacaggttcgtggccagaaggctgcagccgcggaaggagttcgtagagaaggcgcggcgcgctctgggcgccctggccgctgccctgagggagcgcgggggccgcctcggtgctgctgccccgcgggtgctgaaaactgtcaagggaggctcctcgggccggggcacagctctcaagggtggctgtgattctgaacttgtcatcttcctcgactgcttcaagagctatgtggaccagagggcccgccgtgcagagatcctcagtgagatgcgggcatcgctggaatcctggtggcagaacccagtccctggtctgagactcacgtttcctgagcagagcgtgcctggggccctgcagttccgcctgacatccgtagatcttgaggactggatggatgttagcctggtgcctgccttcaatgtcctgggtcaggccggctccgcggtcaaacccaagccacaagtctactctaccctcctcaacagtggctgccaagggggcgagcatgcggcctgcttcacagagctgcggaggaactttgtgaacattcgcccagccaagttgaagaacctaatcttgctggtgaagcactggtaccaccaggtgtgcctacaggggttgtggaaggagacgctgcccccggtctatgccctggaattgctgaccatcttcgcctgggagcagggctgtaagaaggatgctttcagcctaggcgaaggcctccgaactgtcctgggcctgatccaacagcatcagcacctgtgtgttttctggactgtcaactatggcttcgaggaccctgcagttgggcagttcttgcagcggcacgttaagagacccaggcctgtgatcctggacccagctgaccccacatgggacctggggaatggggcagcctggcactgggatttgcatgcccaggaggcagcatcctgctatgaccacccatgctttctgagggggatgggggacccagtgcagtcttggaaggggccgggccttccacgtgctggatgctcaggtttgggccaccccatccagctagaccctaaccagaagacccctgaaaacagcaagagcctcaatgctgtgtacccaagagcagggagcaaacctccctcatgcccagctcctggccccactgcggagccagcatcgtacccctctgtgccgggaatggccttggacctgtctcagatccccaccaaggagctggaccgcttcatccaggaccacctgaagccgagcccccagttccaggagcaggtgaaaaaggccatcgacatcatcttgcgctgcctccatgagaactgtgttcacaaggcctcaagagtcagtaaagggggctcatttggccggggcacagacctaagggatggctgtgatgttgaactcatcatcttcctcaactgcttcacggactacaaggaccaggggccccgccgcgcagagatccttgatgagatgcgagcgcacgtagaatcctggtggcaggaccaggtgcccagcctgagccttcagtttcctgagcagaatgtgcctgaggctctgcagttccagctggtgtccacagccctgaagagctggacggatgttagcctgctgcctgccttcgatgctgtggggcagctcagttctggcaccaaaccaaatccccaggtctactcgaggctcctcaccagtggctgccaggagggcgagcataaggcctgcttcgcagagctgcggaggaacttcatgaacattcgccctgtcaagctgaagaacctgattctgctggtgaagcactggtaccgccaggttgcggctcagaacaaaggaaaaggaccagcccctgcctctctgcccccagcctatgccctggagctcctcaccatctttgcctgggagcagggctgcaggcaggattgtttcaacatggcccaaggcttccggacggtgctggggctcgtgcaacagcatcagcagctctgtgtctactggacggtcaactatagcactgaggacccagccatgagaatgcaccttcttggccagcttcgaaaacccagacccctggtcctggaccccgctgatcccacctggaacgtgggccacggtagctgggagctgttggcccaggaagcagcagcgctggggatgcaggcctgctttctgagtagagacgggacatctgtgcagccctgggatgtgatgccagccctcctttaccaaaccccagctggggaccttgacaagttcatcagtgaatttctccagcccaaccgccagttcctggcccaggtgaacaaggccgttgataccatctgttcatttttgaaggaaaactgcttccggaattctcccatcaaagtgatcaaggtggtcaagggtggctcttcagccaaaggcacagctctgcgaggccgctcagatgccgacctcgtggtgttcctcagctgcttcagccagttcactgagcagggcaacaagcgggccgagatcatctccgagatccgagcccagctggaggcatgtcaacaggagcggcagttcgaggtcaagtttgaagtctccaaatgggagaatccccgcgtgctgagcttctcactgacatcccagacgatgctggaccagagtgtggactttgatgtgctgccagcctttgacgccctaggccagctggtctctggctccaggcccagctctcaagtctacgtcgacctcatccacagctacagcaatgcgggcgagtactccacctgcttcacagagctacaacgggacttcatcatctctcgccctaccaagctgaagagcctgatccggctggtgaagcactggtaccagcagtgtaccaagatctccaaggggagaggctccctacccccacagcacgggctggaactcctgactgtgtatgcctgggagcagggcgggaaggactcccagttcaacatggctgagggcttccgcacggtcctggagctggtcacccagtaccgccagctctgtatctactggaccatcaactacaacgccaaggacaagactgttggagacttcctgaaacagcagcttcagaagcccaggcctatcatcctggatccggctgacccgacaggcaacctgggccacaatgcccgctgggacctgctggccaaggaagctgcagcctgcacatctgccctgtgctgcatgggacggaatggcatccccatccagccatggccagtgaaggctgctgtgtgaagttgagaaaatcagcggtcctactggatgaagagaagatggacaccagccctcagcatgaggaaattcagggtcccctaccagatgagagagattgtgtacatgtgtgtgtgagcacatgtgtgcatgtgtgtgcacacgtgtgcatgtgtgtgttttagtgaatctgctctcccagctcacacactcccctgcctcccatggcttacacactaggatccagactccatggtttgacaccagcctgcgtttgcagcttctctgtcacttccatgactctatcctcataccaccactgctgcttcccacccagctgagaatgccccctcctccctgactcctctctgcccatgcaaattagctcacatctttcctcctgctgcaatccatcccttcctcccattggcctctccttgccaaatctaaatactttatatagggatggcagagagttcccatctcatctgtcagccacagtcatttggtactggctacctggagccttatcttctgaagggttttaaagaatggccaattagctgagaagaattatctaatcaattagtgatgtctgccatggatgcagtagaggaaagtggtggtacaagtgccatgattgattagcaatgtctgcactggatatggaaaaaagaaggtgcttgcaggtttacagtgtatatgtgggctattgaagagccctctgagctcggttgctagcaggagagcatgcccatattggcttactttgtctgccacagacacagacagagggagttgggacatgcatgctatggggaccctcttgttggacacctaattggatgcctcttcatgagaggcctccttttcttcaccttttatgctgcactcctcccctagtttacacatcttgatgctgtggctcagtttgccttcctgaatttttattgggtccctgttttctctcctaacatgctgagattctgcatccccacagcctaaactgagccagtggccaaacaaccgtgctcagcctgtttctctctgccctctagagcaaggcccaccaggtccatccaggaggctctcctgacctcaagtccaacaacagtgtccacactagtcaaggttcagcccagaaaacagaaagcactctaggaatcttaggcagaaagggattttatctaaatcactggaaaggctggaggagcagaaggcagaggccaccactggactattggtttcaatattagaccactgtagccgaatcagaggccagagagcagccactgctactgctaatgccaccactacccctgccatcactgccccacatggacaaaactggagtcgagacctaggttagattcctgcaaccacaaacatccatcagggatggccagctgccagagctgcgggaagacggatcccacctccctttcttagcagaatctaaattacagccagacctctggctgcagaggagtctgagacatgtatgattgaatgggtgccaagtgccagggggcggagtccccagcagatgcatcctggccatctgttgcgtggatgagggagtgggtctatctcagaggaaggaacaggaaacaaagaaaggaagccactgaacatcccttctctgctccacaggagtgtcttagacagcctgactctccacaaaccactgttaaaacttacctgctaggaatgctagattgaatgggatgggaagagccttccctcattattgtcattcttggagagaggtgagcaaccaagggaagctcctctgattcacctagaacctgttctctgccgtctttggctcagcctacagagactagagtaggtgaagggacagaggacagggcttctaatacctgtgccatattgacagcctccatccctgtcccccatcttggtgctgaaccaacgctaagggcaccttcttagactcacctcatcgatactgcctggtaatccaaagctagaactctcaggaccccaaactccacctcttggattggccctggctgctgccacacacatatccaagagctcagggccagttctggtgggcagcagagacctgctctgccaagttgtccagcagcagagtggccctggcctgggcatcacaagccagtgatgctcctgggaagaccaggtggcaggtcgcagttgggtaccttccattcccaccacacagactctgggcctccccgcaaaatggctccagaattagagtaattatgagatggtgggaaccagagcaactcaggtgcatgatacaaggagaggttgtcatctgggtagggcagagaggagggcttgctcatctgaacaggggtgtatttcattccaggccctcagtctttggcaatggccaccctggtgttggcatattggccccactgtaacttttgggggcttcccggtctagccacaccctcggatggaaagacttgactgcataaagatgtcagttctccctgagttgattgataggcttaatggtcaccctaaaaacacccacatatgcttttcgatggaaccagataagttgacgctaaagttcttatggaaaaatacacacgcaatagctaggaaaacacagggaaagaagagttctgagcagggcctagtcttagccaatattaaaacatactatgaagcctctgatacttaaacagcatggcgctggtacgtaaatagaccaatgcagttaggtggctctttccaagactctggggaaaaaagtagtaaaaagctaaatgcaatcaatcagcaattgaaagctaagtgagagagccagagggcctccttggtggtaaaagagggttgcatttcttgcagccagaaggcagagaaagtgaagaccaagtccagaactgaatcctaagaaatgcaggactgcaaagaaattggtgtgtgtgtgtgtgtgtgtgtgtgtgtgtgtttaatttttaaaaagtttttattcggaatccgcg

SEQ ID NO: 482 - protein, 1087 aa, Homo sapiens
MDLYSTPAAALDRFVARRLQPRKEFVEKARRALGALAAALRERGGRLGAAAPRVLKTVKGGSSGRGTALKGGCDSELVIFLDCFKSYVDQRARRAEILSEMRASLESWWQNPVPGLRLTFPEQSVPGALQFRLTSVDLEDWMDVSLVPAFNVLGQAGSAVKPKPQVYSTLLNSGCQGGEHAACFTELRRNFVNIRPAKLKNLILLVKHWYHQVCLQGLWKETLPPVYALELLTIFAWEQGCKKDAFSLGEGLRTVLGLIQQHQHLCVFWTVNYGFEDPAVGQFLQRHVKRPRPVILDPADPTWDLGNGAAWHWDLHAQEAASCYDHPCFLRGMGDPVQSWKGPGLPRAGCSGLGHPIQLDPNQKTPENSKSLNAVYPRAGSKPPSCPAPGPTAEPASYPSVPGMALDLSQIPTKELDRFIQDHLKPSPQFQEQVKKAIDIILRCLHENCVHKASRVSKGGSFGRGTDLRDGCDVELIIFLNCFTDYKDQGPRRAEILDEMRAHVESWWQDQVPSLSLQFPEQNVPEALQFQLVSTALKSWTDVSLLPAFDAVGQLSSGTKPNPQVYSRLLTSGCQEGEHKACFAELRRNFMNIRPVKLKNLILLVKHWYRQVAAQNKGKGPAPASLPPAYALELLTIFAWEQGCRQDCFNMAQGFRTVLGLVQQHQQLCVYWTVNYSTEDPAMRMHLLGQLRKPRPLVLDPADPTWNVGHGSWELLAQEAAALGMQACFLSRDGTSVQPWDVMPALLYQTPAGDLDKFISEFLQPNRQFLAQVNKAVDTICSFLKENCFRNSPIKVIKVVKGGSSAKGTALRGRSDADLVVFLSCFSQFTEQGNKRAEIISEIRAQLEACQQERQFEVKFEVSKWENPRVLSFSLTSQTMLDQSVDFDVLPAFDALGQLVSGSRPSSQVYVDLIHSYSNAGEYSTCFTELQRDFIISRPTKLKSLIRLVKHWYQQCTKISKGRGSLPPQHGLELLTVYAWEQGGKDSQFNMAEGFRTVLELVTQYRQLCIYWTINYNAKDKTVGDFLKQQLQKPRPIILDPADPTGNLGHNARWDLLAKEAAACTSALCCMGRNGIPIQPWPVKAAV

SEQ ID NO: 483 - DNA, 2505 bp, Homo sapiens
cacaccctgcaggacacctcctggcacaacaccaccttctttggggtttttcaagcacagtggggtgacatgtacctgtcggccatctgtgagtaccagttggaagagatccagcgggtgtttgagggcccctataaggagtaccatgaggaagcccagaagtgggaccgctacactgaccctgtacccagccctcggcctggctcgtgcattaacaactggcatcggcgccacggctacaccagctccctggagctacccgacaacatcctcaacttcgtcaagaagcacccgctgatggaggagcaggtggggcctcggtggagccgccccctgctcgtgaagaagggcaccaacttcacccacctggtggccgaccgggttacaggacttgatggagccacctatacagtgctgttcattgacacaggagacggctggctgctcaaggctgtgagcctggggccctgggttcacctgattgaggagctgcagctgtttgaccaggagcccatgagaagcctggtgctatctcagagcaagaagctgctctttgccggctcccgctctcagctggtgcagctgcccgtggccgactgcatgaagtatcgctcctgtgcagactgtgtcctcgcccgggacccctattgcgcctggagcgtcaacaccagccgctgtgtggccgtgggtggccactctggatctctactgatccagcatgtgatgacctcggacacttcaggcatctgcaacctccgtggcagtaagaaagtcaggcccactcccaaaaacatcacggtggtggcgggcacagacctggtgctgccctgccacctctcctccaacttggcccatgcccgctggacctttgggggccgggacctgcctgcggaacagcccgggtccttcctctacgatgcccggctccaggccctggttgtgatggctgcccagccccgccatgccggggcctaccactgcttttcagaggagcagggggcgcggctggctgctgaaggctaccttgtggctgtcgtggcaggcccgtcggtgaccttggaggcccgggcccccctggaaaacctggggctggtgtggctggcggtggtggccctgggggctgtgtgcctggtgctgctgctgctggtgctgtcattgcgccggcggctgcgggaagagctggagaaaggggccaaggctactgagaggaccttggtgtaccccctggagctgcccaaggagcccaccagtccccccttccggccctgtcctgaaccagatgagaaactttgggatcctgtcggttactactattcagatggctcccttaagatagtacctgggcatgcccggtgccagcccggtggggggcccccttcgccacctccaggcatcccaggccagcctctgccttctccaactcggcttcacctggggggtgggcggaactcaaatgccaatggttacgtgcgcttacaactaggaggggaggaccggggagggctcgggcaccccctgcctgagctcgcggatgaactgagacgcaaactgcagcaacgccagccactgcccgactccaaccccgaggagtcatcagtatgaggggaacccccaccgcgtcggcgggaagcgtgggaggtgtagctcctacttttgcacaggcaccagctacctcagggacatggcacgggcacctgctctgtctgggacagatactgcccagcacccacccggccatgaggacctgctctgctcagcacgggcactgccacttggtgtggctcaccagggcaccagcctcgcagaaggcatcttcctcctctctgtgaatcacagacacgcgggaccccagccgccaaaacttttcaaggcagaagtttcaagatgtgtgtttgtctgtatttgcacatgtgtttgtgtgtgtgtgtatgtgtgtgtgcacgcgcgtgcgcgcttgtggcatagccttcctgtttctgtcaagtcttcccttggcctgggtcctcctggtgagtcattggagctatgaaggggaaggggtcgtatcactttgtctctcctacccccactgccccgagtgtcgggcagcgatgtacatatggaggtggggtggacagggtgctgtgccccttcagagggagtgcagggcttggggtgggcctagtcctgctcctagggctgtgaatgttttcagggtggggggagggagatggagcctcctgtgtgtttggggggaagggtgggtggggcctcccacttggccccggggttcagtggtattttatacttgccttcttcctgtacagggctgggaaaggctgtgtgaggggagagaagggagagggtgggcctgctgtggacaatggcatactctcttccagccctaggaggagggctcctaacagtgtaacttattgtgtccccgcgtatttatttgttgtaaatatttgagtatttttatattgacaataaaatggagaaaatgaaaaaaaaaaaaaaaaaaaa

SEQ ID NO: 484 - protein, 510 aa, Homo sapiens
MYLSAICEYQLEEIQRVFEGPYKEYHEEAQKWDRYTDPVPSPRPGSCINNWHRRHGYTSSLELPDNILNFVKKHPLMEEQVGPRWSRPLLVKKGTNFTHLVADRVTGLDGATYTVLFIDTGDGWLLKAVSLGPWVHLIEELQLFDQEPMRSLVLSQSKKLLFAGSRSQLVQLPVADCMKYRSCADCVLARDPYCAWSVNTSRCVAVGGHSGSLLIQHVMTSDTSGICNLRGSKKVRPTPKNITVVAGTDLVLPCHLSSNLAHARWTFGGRDLPAEQPGSFLYDARLQALVVMAAQPRHAGAYHCFSEEQGARLAAEGYLVAVVAGPSVTLEARAPLENLGLVWLAVVALGAVCLVLLLLVLSLRRRLREELEKGAKATERTLVYPLELPKEPTSPPFRPCPEPDEKLWDPVGYYYSDGSLKIVPGHARCQPGGGPPSPPPGIPGQPLPSPTRLHLGGGRNSNANGYVRLQLGGEDRGGLGHPLPELADELRRKLQQRQPLPDSNPEESSV

SEQ ID NO: 485 - DNA, 2421 bp, Homo sapiens
cagtgctgcgggctccgggcaatggatgcccccggggccctggcccagaccgccgcccccggtccgggcaggaaggagctgaagatcgtgatcgtgggcgacggcggctgcggcaagacctcgctgctcatggtgtacagccagggctccttccccgagcactacgccccatcggtgttcgagaagtacacggccagcgtgaccgttggcagcaaggaggtgaccctgaacctctacgacacggccgggcaagaagactatgaccggctgcggcccctgtcctaccagaacacccacctcgtgctcatctgctatgacgtcatgaatcccaccagctacgacaacgtcctcatcaagtggttccctgaggtcacgcatttctgccgcgggatccccatggtgctcatcggctgcaagacagacctgaggaaggacaaggagcagccgcggaagctccgggccgcccagctggagcccatcacctacatgcagggcctgagcgcctgcgaacagatccgagctgctctctacctggaatgttccgccaagtttcgggagaatgtggaggacgtcttccgggaggccgccaaggtggctctcagcgctctgaagaaggcgcaacggcagaagaagcgccggccctgcctgctgctctgacccagggcagacagacctcacgacagcactgacagggcccgggggcccaggtgccgattgcaccagggaggctgccccatcccgaccctccagctcatggtgtctggggcctgcggctagactcttggaacattctggaactctctcctttcctggctggggctctgaccacaaactcccctccaggctgcccctgggacatggtggtgatgtgggtgcaggagccagtgtctgttgtcgggactcgcaagtgccctcatcacagccacccccaccacgagtgtctccccagtgcagactcaagttatgcttgaaatgaaaaagtctatctggtagtgggtaaacgtagacctggcactgttccacgcgggcgccccaagcctgccactcctgtgtccctgcctccctgggctcccgagataggcaccactgtatcctccagctccttccttccttcccccaggaacacggaggccaccgagggggctgggcctatcaggaggacacaggctgcagcctggcacccacccctcccatctccaccccacatggaagacttgtcttcaacttggccactgtctttgcagagctgggcacatgtgcccagggggcagaaaaaatggcttctcagttgttaaaagtataccctggaccacccatctgaccatctccttaaggtttcacccaaagcccccagtgtcagagacttgggatgggaagaacagtcggctcccagtgtggtcatgagcaagttttctgtggactgttccccccactgcggcaggacaggactggcccacttagtcctcaagctcccaacctgctgtccctcaagccccgcttctaccagcctgtggagttcaggaggcgagacatcctggcctcctttgagaactgatgggatctaccccctgtccacgcgggacagtttctcagaactggttcatagaccacctgtgtcaccaacagccagatacctaatccctgagcctcctttgggaaggtctggggccgagggtctgggaatttttttttttttttttttttttgggacagagtctcattctgtcactcaggctagagtgcagtggcatgatcttggctcactgcaagctccacctcctgggttcaagcgattctcttgcctcagcctcctgagtagctgggactacatgcgcacaccaccacgtccggctaatttttgtatttttagtagagacagggtttcaccatgttggccaggctggtcttgaactcctgacctcgtgatccacccgccttagcctcccaaagtgctgggattacaggcgtgagccaccgtgcccggcccaggacttttaaaacaagcatcccaggggattccggtgcccaccagaagtcgcaagctgcttggctctggagggcgcctaggagtcggtgtcgcctaagatgggataatggcttcaggcaactcccagccttccccatatctcctgcctcagcccccctggcccagtgctggggcgtcagctaaacctgagcttccaagaagtcaggttgccaaaggaagaagccttctgagaccctccccaacccacccaggttcccaaggccctgccgtaccctggggaatcaaccaaggagttcttgttctcgaagaaccccaggcctcatgatggtctacggtagaggtccaacaactacagcctgtgggccacatctggccacagcctgatttgtaaataaagttttattggaacacaaaaaaaaaaaaaaaaaaaaaaa

SEQ ID NO: 486 - protein, 211 aa, Homo sapiens
MDAPGALAQTAAPGPGRKELKIVIVGDGGCGKTSLLMVYSQGSFPEHYAPSVFEKYTASVTVGSKEVTLNLYDTAGQEDYDRLRPLSYQNTHLVLICYDVMNPTSYDNVLIKWFPEVTHFCRGIPMVLIGCKTDLRKDKEQPRKLRAAQLEPITYMQGLSACEQIRAALYLECSAKFRENVEDVFREAAKVALSALKKAQRQKKRRPCLLL

SEQ ID NO: 487 - DNA, 1635 bp, Homo sapiens
ggcacgagcgcggcgttcacgggaattgttcgctttagtgccggcgccatggggtcggagctgatcgggcgcctagccccgcgcctgggcctcgccgagcccgacatgctgaggaaagcagaggagtacttgcgcctgtcccgggtgaagtgtgtcggcctctccgcacgcaccacggagaccagcagtgcagtcatgtgcctggaccttgcagcttcctggatgaagtgccccttggacagggcttatttaattaaactttctggtttgaacaaggagacatatcagagctgtcttaaatcttttgagtgtttactgggcctgaattcaaatattggaataagagacctagctgtacagtttagctgtatagaagcagtgaacatggcttcaaagatactaaaaagctatgagtccagtcttccccagacacagcaagtggatcttgacttatccaggccacttttcacttctgctgcactgctttcagcatgcaagattctaaagctgaaagtggataaaaacaaaatggtagccacatccggtgtaaaaaaagctatatttgatcgactgtgtaaacaactagagaagattggacagcaggtcgacagagaacctggagatgtagctactccaccacggaagagaaagaagatagtggttgaagccccagcaaaggaaatggagaaggtagaggagatgccacataaaccacagaaagatgaagatctgacacaggattatgaagaatggaaaagaaaaattttggaaaatgctgccagtgctcaaaaggctacagcagagtgatttcagcttccaaactggtatacattccaaactgatagtacattgccatctccaggaagacttgacggctttgggattttgtttaaacttttataataaggatcctaagactgttgcctttaaatagcaaagcagcctacctggaggctaagtctgggcagtgggctggcccctggtgtgagcattagaccagccacagtgcctgattggtatagccttatgtgctttcctacaaaatggaattggaggccgggcgcagtggctcacgcctgtaatcccagcactttgggaggccaaggtgggtggatcacctgaggtcaggagctcgagaccagcctggccaacatggtgaaaccccatctctactaaaaatacaaaaattagccaggtgtgatggtgcatgcctgtaatcccagctcctcagtaggctgagacaggagcatcacttgaacgtgggaggcagaggttgcagtgagccgagattgcaccaccgcactccagcctgggtgacagagcgagacttatctcataaataaatagatagatactccagcctgggtgacagagcgagacttatagatagatagatagatagatggatagatagatagatagatagatagatagataaacggaattggagccattttgctttaagtgaatggcagtcccttgtcttattcagaatataaaattcagtctgaatggcatcttacagattttacttcaatttttgtgtacggtattttttatttgactaaatcaatatattgtacagcctaagttaataaatgttatttatatatgcaaaaaaaaaaaaaaaaaaaa

SEQ ID NO: 488 - protein, 252 aa, Homo sapiens
MGSELIGRLAPRLGLAEPDMLRKAEEYLRLSRVKCVGLSARTTETSSAVMCLDLAASWMKCPLDRAYLIKLSGLNKETYQSCLKSFECLLGLNSNIGIRDLAVQFSCIEAVNMASKILKSYESSLPQTQQVDLDLSRPLFTSAALLSACKILKLKVDKNKMVATSGVKKAIFDRLCKQLEKIGQQVDREPGDVATPPRKRKKIVVEAPAKEMEKVEEMPHKPQKDEDLTQDYEEWKRKILENAASAQKATAE

SEQ ID NO: 489 - DNA, 2422 bp, Homo sapiens
acaagcagaagtcaattgtccggtcccacttacaactcatcaaagctgtgagccagttaatagccgatgctgggattggaggctctcggtttcaacattcgcttgcaattaccaataatttcgccaatggagataagcaaatgaaaaacagcaatttcccagcagaggtgaaggacctgactaagcgtataaggactgttttgatggccacagctcagatgaaggagcacgagaaggaccccgagatgctggtggatctccagtacagcctggcaaactcctacgcaagcactcctgaactacgcaggacctggctggaaagtatggccaagattcatgccagaaacggagatttatctgaggctgccatgtgttacatccatattgctgctctcattgcagagtatctgaaaagaaagggttactggaaagtggaaaagatttgcacagcatccctgctctcggaggatacccacccctgtgatagcaactcattactaacaactcccagtggaggaagcatgttctctatgggatggccagcttttttgagcattacaccaaacattaaggaagaaggagcgatgaaagaggattctggaatgcaagatacaccatacaatgagaatatcctggtggagcagctatacatgtgtgtggagtttctctggaagtctgagcgatatgaactcattgctgatgtcaacaagcccatcattgctgtctttgagaaacaacgagacttcaaaaaattgtcagatctctactacgacattcatcggtcatatctgaaagtggcagaggtggtgaattcggagaagcggctgtttggtcgctactatcgtgtggcattttatgggcagggcttttttgaagaagaagaaggtaaagagtatatttataaagagcctaagctgacaggtctgtccgagatttcccaaagattactcaagctctatgcagataaatttggagcagacaatgtgaagataatccaggattccaacaaggtaaaccccaaggatttggaccccaaatatgcctacatccaggtgacctatgtgacgccgttctttgaggaaaaggaaatcgaagaccggaagtcagatttcgaaatgcaccacaacatcaaccgctttgtcttcgagacacccttcacgctgtcgggcaagaagcacggtggggtggcggagcagtgcaagcggcggacgatcctgacaacgagtcacctgttcccctacgtgaagaagagaatacaagtaattagccaatcgagcacagaactgaatccaattgaagtggcaattgacgagatgtccaagaaggtttctgagcttaatcagctttgcacaatggaagaagtggacatgatcagactgcagctcaaactgcaaggaagtgtcagcgtgaaggttaatgctgggccaatggcctatgcacgagcttttcttgaagaaaccaatgcaaagaagtaccctgacaaccaagtaaagcttttgaaggagatcttcaggcaatttgcagatgcatgtgggcaggcccttgacgtgaatgagcgcctcatcaaagaggaccagctggagtaccaggaagaactgaggtccactacaaggacatgctcagcgaactctccacagtcatgaatgagcagattacgggcagggacgacctgtcaaagcgcggagtggaccaaacctgcactcgagtaattagcaaagcaactccggccctacccacggtctccatctcatctagtgctgaagtctgagggctctgcagcatcagacccacctctaagagaactttctgaatttgcagctaatctcggggaagagaaagataggtttaatttatttgaagttttcatggtgttaatatttttgtttacctcgctagcttcagaattttgccaacctctgaatttgcacattttgtataattttttttttctttgagcagtgttgatcaagccaagttgaatatttgccatgaaattccagtgaatgtgtagctcaaatgcaaaccataagtttgctgtcagttattgtatggtcagtaccccagtcctagtacacatattttaaaggttaaagtgaatgtttttgtaacatttaagcatatttcagatgtaaataaaagattgtaaaatatacggtttttaccaaatttaaaagatcctttttagttaatactatgacagtactaaaaatatatgaataacatttcagataccattatattaaaatatttgtgtatgtgtacaaaagcgttgataaatactaatctttaaagtttgtggagttcctttatttgtaatatatgtgctcttaaaagcaatgggatgtgaaattatgaaagtattttattgttcatagaaataaaaaacacagttactttgcaaaaaaaaaaaaaaaaaaaaaaa

SEQ ID NO: 490 - protein, 500 aa, Homo sapiens
MKNSNFPAEVKDLTKRIRTVLMATAQMKEHEKDPEMLVDLQYSLANSYASTPELRRTWLESMAKIHARNGDLSEAAMCYIHIAALIAEYLKRKGYWKVEKICTASLLSEDTHPCDSNSLLTTPSGGSMFSMGWPAFLSITPNIKEEGAMKEDSGMQDTPYNENILVEQLYMCVEFLWKSERYELIADVNKPIIAVFEKQRDFKKLSDLYYDIHRSYLKVAEVVNSEKRLFGRYYRVAFYGQGFFEEEEGKEYIYKEPKLTGLSEISQRLLKLYADKFGADNVKIIQDSNKVNPKDLDPKYAYIQVTYVTPFFEEKEIEDRKSDFEMHHNINRFVFETPFTLSGKKHGGVAEQCKRRTILTTSHLFPYVKKRIQVISQSSTELNPIEVAIDEMSKKVSELNQLCTMEEVDMIRLQLKLQGSVSVKVNAGPMAYARAFLEETNAKKYPDNQVKLLKEIFRQFADACGQALDVNERLIKEDQLEYQEELRSTTRTCSANSPQS

SEQ ID NO: 491 - DNA, 4775 bp, Homo sapiens
cagtcgcgcgcggtgcagtcgggaggtggaggcaccggctgcattgttttcgggatcgaggggtgagggcgctatggcacccggctgcaaaactgagttacgcagcgtgacaaatggtcagtctaaccaaccaagtaatgaaggtgatgccatcaaagtttttgtgcgaattcgtcctcctgcagaaagatctgggtcagctgatggagagcagaacttatgcttatctgtgctgtcctccacgagtctccggctgcactccaaccctgagcccaagaccttcacgtttgatcatgttgcagatgtggataccactcaggaatctgtatttgcaactgtggctaaaagcattgtggagtcttgcatgagcggttataatggtaccatctttgcatatggacagactggctcagggaagacatttactatgatgggaccatctgaatctgataatttttctcataacctgagaggagtaatcccacgaagttttgaatatttgttttccttaattgatcgtgaaaaagaaaaggctggagctggaaagagtttcctttgtaagtgttcctttattgaaatctacaacgagcagatatatgatctactggactctgcatcggctggactgtacttaagggagcatatcaagaagggagtctttgttgttggtgcggtggagcaggtggtaacctcagctgctgaagcctatcaggtgctgtctggaggatggaggaatagacgtgtggcatcaacatcaatgaacagagaatcgtctaggtctcatgccgtctttacaattacaatagagtcaatggagaaaagtaatgagattgtgaatatacggacctccctactcaacctggtggatttagcaggatctgaaaggcaaaaagatacccatgcagaagggatgagattgaaggaagcaggtaacataaatcgatcattgagctgcctgggccaagtgattacagcacttgtcgacgtgggtaatggaaaacagagacatgtttgctacagagactccaaacttaccttcttactacgggattcccttggaggtaatgccaaaacagccataattgcaaatgttcatcctggatccaggtgttttggggaaaccctatcaacacttaactttgctcaaagagccaagctgattaaaaacaaggcagtagtaaatgaagacacccaaggaaatgtgagccagctccaagctgaagtgaagaggctcaaagaacaactggcggagcttgcttcaggacagacaccaccagaaagcttcctgaccagagacaaaaagaagactaactatatggagtatttccaggaagcaatgttattctttaagaaatctgaacaggaaaagaagtctctgatagaaaaagttacccaattagaagacctcaccctcaaaaaggaaaaatttattcaatctaataaaatgattgtgaaattccgagaggatcaaataatacgcttggaaaagctccacaaggaatcccggggaggttttctgcctgaggagcaggatcgtttgctctcagaattaaggaatgagattcaaactctgcgagaacaaatagagcaccaccccagagttgcaaagtatgctatggaaaatcattccctcagggaggagaatagaagactgagattattagagcctgtgaaaagagctcaagaaatggatgcccagaccattgcaaaactagaaaaagctttctctgaaataagtggcatggagaaaagtgacaaaaatcagcaaggattttcacctaaagctcagaaagagccatgtttgtttgcaaacactgagaagttaaaagcacaactcctgcaaattcagacagagctgaataattcaaagcaagaatatgaagaattcaaagaacttactaggaaaaggcagctagaattggaatcagagcttcagtctttgcaaaaagcgaaccttaatcttgaaaaccttttggaagcaacaaaagcctgcaagcggcaagaagtttctcagctgaataaaattcatgctgaaacacttaagattataactacaccaaccaaggcctaccaacttcattcccgaccagtaccaaaattaagccctgaaatgggaagctttggctctctatacactcagaattctagcatattagataatgatatattaaatgagccagttcctcctgagatgaatgaacaagcttttgaggccatttctgaagagcttagaacagtgcaggaacaaatgagtgctcttcaagccaaactggatgaagaagagcataaaaacctaaagcttcagcagcatgttgacaaactggaacatcattctacccaaatgcaggagcttttctcatcagaaagaattgattggaccaaacagcaggaagagcttctctcacagttgaatgtccttgaaaagcagcttcaagagactcaaactaaaaatgactttttgaaaagtgaggtacatgacctgcgagtagtccttcattctgctgacaaggagctttcttcagtgaaattggaatatagttcattcaaaacgaatcaggagaaagaattcaacaaactttctgaaagacacatgcatgtacagcttcaattagataatctcaggttagaaaacgaaaagctgcttgagagcaaagcctgcctacaggattcctatgacaacttacaagaaataatgaaatttgagattgaccaactttcaagaaacctccaaaacttcaaaaaagaaaatgaaactctgaaatctgatctgaataatttgatggagcttcttgaggcagaaaaagaacgcaataacaaattatcattacagtttgaagaagataaagaaaacagttctaaagaaatcttaaaagttcttgaggctgtacgtcaggagaaacagaaagagacggccaagtgtgagcagcagatggcaaaagtacagaaactagaagagagcttgcttgctactgaaaaagtgatcagttccctggaaaagtctagagattctgataagaaagttgtagctgacctcatgaaccagatccaggagctaagaacatcggtctgtgagaaaacagaaactatagacaccctgaaacaagaactgaaggacataaattgcaaatacaactctgctttggttgacagagaagagagcagagtgttgatcaagaagcaggaagtggatattctggatctgaaagaaacccttaggctgagaatactttctgaggacatagagagggatatgctctgtgaggacctggctcatgccactgagcagctgaacatgctcacagaggcctcaaaaaaacactcggggctgctgcagtctgcccaggaagaactgaccaagaaggaagccctgattcaggaacttcagcacaagctaaaccaaaagaaagaggaagtagaacagaagaagaatgaatataacttcaaaatgaggcaactagaacatgtgatggattctgctgctgaggatccccagagtcctaagacaccacctcactttcaaacacatttggcaaaactcctggaaacacaagaacaagagatagaagatggaagagcctctaagacttctttggaacaccttgtaacaaagctaaatgaagacagagaagtcaaaaatgctgaaatcctcagaatgaaggagcagttgcgtgaaatggaaaacctacgcctggaaagtcagcagttaatagagaaaaactggctcctgcaaggtcagctggatgatattaaaagacaaaaggaaaacagtgatcagaatcatccagataatcaacagctgaagaatgaacaagaagaaagtatcaaagaaagacttgcaaaaagtaaaatagttgaagaaatgctgaaaatgaaagcagacctagaagaagtccaaagtgccctttacaacaaagagatggaatgccttagaatgactgatgaagtcgaacgaacccaaactttggagtctaaagcattccaggaaaaagaacaactgagatcaaagctggaagaaatgtatgaagaaagagagagaacatcccaggagatggaaatgttaaggaagcaggtggagtgtcttgctgaggaaaatggaaagttggtaggtcaccaaaatttgcatcagaagattcagtacgtagtgcgactaaagaaggaaaatgtcaggcttgctgaggagacagaaaagttgcgtgccgaaaatgtatttttaaaagaaaagaaaagaagtgaatcttgaggattccggtcagctacctaggcatcaccttgtttgaagatgtttcttctcttttacaagtaagacctactcctggccacttaggagagctgaatttatggaccttaattattaaatgtttataaggtggtggtaaccacctcaagtttctgatgaacattctgcatccatatacaccctgtgacagtcagcagtctgctattaagtggcctacttcaaggctttgaatcaacttaagggaaaaccttttgtctttgtaaaaataaaagcctgtagctaaggtttacagtggacattagccagatcattttcttcttagattatgccataatctcctttgattcttatggaagttctaacaatatatggtggttccaacacctgcagtgagtttaatgactgacttagtagcaggtacaagaagcaaacttgttaatatagattatttttgtattcttactttaggtattttacttgagcattttccatgactgtaaataaagccattttttaagataaaaaaaaaaaaaaaaaa

SEQ ID NO: 492 - protein, 1388 aa, Homo sapiens
MAPGCKTELRSVTNGQSNQPSNEGDAIKVFVRIRPPAERSGSADGEQNLCLSVLSSTSLRLHSNPEPKTFTFDHVADVDTTQESVFATVAKSIVESCMSGYNGTIFAYGQTGSGKTFTMMGPSESDNFSHNLRGVIPRSFEYLFSLIDREKEKAGAGKSFLCKCSFIEIYNEQIYDLLDSASAGLYLREHIKKGVFVVGAVEQVVTSAAEAYQVLSGGWRNRRVASTSMNRESSRSHAVFTITIESMEKSNEIVNIRTSLLNLVDLAGSERQKDTHAEGMRLKEAGNINRSLSCLGQVITALVDVGNGKQRHVCYRDSKLTFLLRDSLGGNAKTAIIANVHPGSRCFGETLSTLNFAQRAKLIKNKAVVNEDTQGNVSQLQAEVKRLKEQLAELASGQTPPESFLTRDKKKTNYMEYFQEAMLFFKKSEQEKKSLIEKVTQLEDLTLKKEKFIQSNKMIVKFREDQIIRLEKLHKESRGGFLPEEQDRLLSELRNEIQTLREQIEHHPRVAKYAMENHSLREENRRLRLLEPVKRAQEMDAQTIAKLEKAFSEISGMEKSDKNQQGFSPKAQKEPCLFANTEKLKAQLLQIQTELNNSKQEYEEFKELTRKRQLELESELQSLQKANLNLENLLEATKACKRQEVSQLNKIHAETLKIITTPTKAYQLHSRPVPKLSPEMGSFGSLYTQNSSILDNDILNEPVPPEMNEQAFEAISEELRTVQEQMSALQAKLDEEEHKNLKLQQHVDKLEHHSTQMQELFSSERIDWTKQQEELLSQLNVLEKQLQETQTKNDFLKSEVHDLRVVLHSADKELSSVKLEYSSFKTNQEKEFNKLSERHMHVQLQLDNLRLENEKLLESKACLQDSYDNLQEIMKFEIDQLSRNLQNFKKENETLKSDLNNLMELLEAEKERNNKLSLQFEEDKENSSKEILKVLEAVRQEKQKETAKCEQQMAKVQKLEESLLATEKVISSLEKSRDSDKKVVADLMNQIQELRTSVCEKTETIDTLKQELKDINCKYNSALVDREESRVLIKKQEVDILDLKETLRLRILSEDIERDMLCEDLAHATEQLNMLTEASKKHSGLLQSAQEELTKKEALIQELQHKLNQKKEEVEQKKNEYNFKMRQLEHVMDSAAEDPQSPKTPPHFQTHLAKLLETQEQEIEDGRASKTSLEHLVTKLNEDREVKNAEILRMKEQLREMENLRLESQQLIEKNWLLQGQLDDIKRQKENSDQNHPDNQQLKNEQEESIKERLAKSKIVEEMLKMKADLEEVQSALYNKEMECLRMTDEVERTQTLESKAFQEKEQLRSKLEEMYEERERTSQEMEMLRKQVECLAEENGKLVGHQNLHQKIQYVVRLKKENVRLAEETEKLRAENVFLKEKKRSES

SEQ ID NO: 493 - DNA, 2578 bp, Homo sapiens
gcccaggcctggctgaggcgccgcggccgggtccctctccacctgccgggcggagcgcacgggccatgggctgagccccgctgagcccgccgggccggccatgggcgatcgcgagcgcaacaagaagcggctgctggagctgctgcgggcgccggacacaggcaacgcgcactgcgccgactgcggggcggcagatcccgactgggcctcttacaagctggggatcttcatctgtctcaactgctgcggcgtccaccgtaacttccctgacatcagcagagttaaatctgtgcgacttgacttctgggacgacagtattgtggagtttatgatccacaatggaaacctccgtgtgaaggccaagttcgaagccagagtcccagctttctactacatcccccaggccaacgactgcctggtcttaaaggaacaatggattcgagctaagtatgagagacgggaatttatggctgatggggaaaccatctcgctcccaggtaaccgagaaggattcctgtggaagcgaggaagggacaactcacagtttctgagaaggaagtttgtacttctggcaagagaaggcctcctgaagtacttcacaaaggaacagggtaaaagccccaaagctgtcatcagcattaaggacttgaatgccaccttccagacagagaagatagggcacccccatgggctgcagatcacctacaggagagatggccacaccaggaacctgtttgtgtatcatgaaagtgggaaggagatagtggactggttcaatgccctccgtgcagcccgtctgcagtacctaaaaatggcctttcctgaactcccagagtctgagctcgtgccattcctcaccaggaactacctcaaacaaggcttcatggaaaagactgggccaaagcagaaagaacctttcaagaaaaggtggttcgccctggattgccatgagcggaggctgctctattacaagaacccactggatgccttcgagcagggccaggtttttcttgggaacaaggagcagggatatgaagcctacgaagacctgcccaagggcatccgaggaaatcgctggaaagccggactcaccattgtcaccccagagcggagatttgtcctcacttgccccagtgagaaggaacagcaggaatggctggaaagtttgcggggtgtcctgtccagccccttgacgcccctcaaccggcttactgcatcaacagagagtggccgcagcagcaggtgacccattaactgaggaactggctgccactgaacacctggaactccttgtgggaagaagtttgcacctcggccctggctgcccaccatcagtgccccgcagtcagcagccattcctggcagtgaactctgccaggactgaagctgtggctttatccatcagctccctgggccttccccgcaacccacctcggggatctgaggatctggtgcatagatgaacatctatcccctcctcccccatacacacctaggcttgaaatgccctacaggcccagaactttctcacatctgaaatggaggcattgcaatgaaaaggcacccacagcatcatgcaagtggcatcttgtaaaaaaaaaaaaaaagtttaatctgaatctaaccatgaggaaataatcagacaaatccacattaggggcattctgctaaacatctgacccagactcttcamaaatgaagagtgaaagataaagtagtcaatggccgggcgcagtgagattgcgccattgcattccagcctgggtgacagagcgagactccgtatcagaaagaaaaagaggaactgaatgaaatctcagatggctgaaatgttagagaaacagagcaccaagtcccctgctctgtgactcgttgttcctttcctctgtcttcaagcaccacgcagaaatacactggatgttctctctttgcttcaatggagacccaaggagctgggaggtctcttaagagactctctgattctccgtggctgggtgtgatggctcatgcccataatcccagccctttgggaagctgaggcaggaggattgagaccaggagttcgagaagagcctgggcaacatagtgagaccccatctctacaaagaaaaaaaaattagctggacatggtaatgaatgcctgtagtcccagctactccggacactgatgtgagaggatcacttgagccagggaggtcatggctacagtgacccctcattgcaccactttacttagcctgggtgacagagtgagaccctatctcaaaaaaaaaaaaaatctatgcattgtatgggactttcctttggatcccccaatcaaaggataagcaatgcgtaagcctgtgtccttcctgaagcttctcgactgcccagatagggaggtgagtcctctctatctcctctggctctggaagcaccttgaaaatgtgcattttcaaggacacttgctgggttgtgcattaagggccagtttacttgtctgcctctttgaccacctgtgaactctgttgggtgtactctgctaagttctggggatgaggaaattaataaaggtacagtcttgccttcaaaaaaaaaa

SEQ ID NO: 494 - protein, 381 aa, Homo sapiens
MGDRERNKKRLLELLRAPDTGNAHCADCGAADPDWASYKLGIFICLNCCGVHRNFPDISRVKSVRLDFWDDSIVEFMIHNGNLRVKAKFEARVPAFYYIPQANDCLVLKEQWIRAKYERREFMADGETISLPGNREGFLWKRGRDNSQFLRRKFVLLAREGLLKYFTKEQGKSPKAVISIKDLNATFQTEKIGHPHGLQITYRRDGHTRNLFVYHESGKEIVDWFNALRAARLQYLKMAFPELPESELVPFLTRNYLKQGFMEKTGPKQKEPFKKRWFALDCHERRLLYYKNPLDAFEQGQVFLGNKEQGYEAYEDLPKGIRGNRWKAGLTIVTPERRFVLTCPSEKEQQEWLESLRGVLSSPLTPLNRLTASTESGRSSR

SEQ ID NO: 495 - DNA, 2333 bp, Homo sapiens
gccaagattcggcacgaggccggcgtcccaagtgtagtggaggggggatcccgactccagtccggggccttggccagcggagccgcgctattcggaagcgggaatcccactcagagcccgggcctgtaggggcggggcgtcccgggcacccgggattggggcgtctcccgtcgtgcaccggggcaccggcgactcacccggaaggagaagccgtgatctggctatatggtggggcgcgggcggtgtcgctgtggggagctggtgctgttctcagatgtttccttccaatgggcttttggtgtaggatgtcggagaaccaagaacaggaggaggtgattacagtgcgtgttcaggacccccgagtgcagaatgagggctcctggaactcttatgtggattataagatattcctccataccaacagcaaagcctttactgccaagacttcctgtgtgcggcgccgctaccgtgagttcgtgtggctgagaaagcagctacagagaaatgctggtttggtgcctgttcctgaacttcctgggaagtcaaccttcttcggcacctcagatgagttcattgagaagcgacgacaaggtctgcagcacttccttgaaaaggtcctgcagagtgtggttctcctgtcagacagccagttgcacctattcctgcaaagccagctctcggtgcctgagatagaagcctgtgtccagggccgaagtaccatgactgtgtctgatgccattcttcgatatgctatgtcaaactgtggctgggcccaggaagagaggcagagctcttctcacctggctaaaggagaccagcctaagagttgctgctttcttccaagatcgggtaggaggagctctccctcaccgcctcccagtgaagaaaaggaccatttagaagtgtgggctccagttgttgactctgaggttccttccttggaaagtcccactctcccacccctctcctcaccattatgctgtgattttggaagacccaaagagggaacctccactcttcagtctgtgaggagggctgtgggaggagatcatgctgtgcctttggaccctggtcagttagaaacagttttggaaaagtgagctctcggttctgctctgagatggtcagagaagatgcgggccaggagacttactcaggtgggactgggcacagggcaggtatgtgggaggctgggctgcttagtgtcttctagtcacctctgcttgggctgattgacagaggtcagtcattacagccccttatgcctcttccatgggaacaaatactgtgcagatgtttgtaagttaaacataagacacaggggctgttgcttttgaacagaaccctatattactctcctgggatctgagtttctgcaggtcatttgtatgtaggaccaggagtatctcctcaggtgaccagttttggggacccgtatgtggcaaattctaagctgccatattgaacatcatcccactgggagtggttatgttgtatccccatcttggctggcttcagtttttgctgtagccctagagcactttgtttgtgggaggctggcctcttgcctacctccttgcatggacagggggatgaatatttactttcccacctccttgctttttctttcactgataccactgaatggaactggtgctgtgactcctgctgctggggatttatgtcccgagaccttagcctggctgagtggagcctgagacctgcacaacagctcatggtcatgcatgagagagaagtggctggccacagcagacgggaacagtaacagcccagggcctttattttgggaaaggctgtccggggctgttactgtctcttctggttataaagcagacatgtggccatcttttccgcagggttagagtgggctcctttctttttggaatccttttcttctcctttggtagcagctccctgcctccagggcttccgccaccagcgtctctgctgtgttgcgcagtgcagtggggtgcaagggctttgtttctgcctgcctgaaagagagggctctggggatggagatgagaaacaacacgctctccttcagacaatgaggcattctgtcctcctgctgccattcttcatctccactgagagccagagctggtaggagccgagtgccacaggcattctgcattgctctactcttaggtttgtgtgtgtgatccttcccctccctgtcgcccactcctccctcctctggctatcctaccctgtctgtgggctcttttactaccagcctatgctgtgggactgtcatggcatttagttcagagtggagggctttggcctgaaataaaatgcaagtattt

SEQ ID NO: 496 - protein, 264 aa, Homo sapiens
MSENQEQEEVITVRVQDPRVQNEGSWNSYVDYKIFLHTNSKAFTAKTSCVRRRYREFVWLRKQLQRNAGLVPVPELPGKSTFFGTSDEFIEKRRQGLQHFLEKVLQSVVLLSDSQLHLFLQSQLSVPEIEACVQGRSTMTVSDAILRYAMSNCGWAQEERQSSSHLAKGDQPKSCCFLPRSGRRSSPSPPPSEEKDHLEVWAPVVDSEVPSLESPTLPPLSSPLCCDFGRPKEGTSTLQSVRRAVGGDHAVPLDPGQLETVLEK

SEQ ID NO: 497 - DNA, 2216 bp, Homo sapiens
ggaagctcagcagtgtccactgtcgccattccttggccatagaaaacaatgtatttgaattttgatgtaagcatagcaaattgaagatgaagatgacacgttgatttcttgtttgaaattaaccaagtcccgagaaaagaaagtgaatagtgttagcacgaggaggaaggaagaaatggagattagattggatactctttctgcatcactgggtagatccagcactttaaatgactgcaacttggaagataaattagcttggtatgaaggtgaagcttacatgtggcatcactggaagccttttcctgaaaaccctctctggacatgtcttgatttccaaatagcacaagttggaccctgggactactgctcctcttgtattcgccacacacgtctcaagtcttcctgctcagatatggatctcctacattcatggcgaagcagcagttttgggaatttcgatcgttttcggaataattctttatcaaaaccagatgattcaactgaggcacatgaaggagatcccacaaatggaagtggagaacaaagtaaaacttcaaataatggaggcggtttgggtaaaaaaatgagagctatttcatggacaatgaagaaaaaagtgggtaaaaagtacatcaaagccctttctgaggaaaaggatgaggaagatggagagaatgcccacccatatagaaacagtgaccctgtgattgggacccacacagagaaggtgtccctcaaagccagtgactccatggatagtctctacagtggacagagctcatcaagtggcataacaagctgttcagatggtacaagtaaccgggacagctttcgactggatgacgatggcccctattcaggaccattctgtggccgtgccagagtgcatacggatttcacgccaagtccctatgacactgactccctcaaaatcaagaaaggagacatcatagacattatttgcaaaacaccaatggggatgtggacaggaatgttgaacaataaagtgggaaacttcaaattcatttatgtggatgtcatctcagaagaggaagcagcccccaagaaaataaaggcaaaccgaaggagtaacagcaaaaaatccaagactctgcaggagttcctagagaggattcatctgcaggaatacacctcaacacttttgctcaatggttatgagactctagaagatttaaaagatataaaagagagtcacctcattgaattaaatattgaaaacccagatgacagaagaaggttactatcagctgctgaaaacttccttgaagaagaaattattcaagagcaagaaaatgaacctgagcccctatccttgagctcagacatctccttaaataagtcacagttagatgactgcccaagggactctggttgctatatctcatcaggaaattcagataatggcaaagaggatctggagtctgaaaatctgtctgacatggtacataagattattatcacagagccaagtgactgaacacgcattcccaactatatatctacagatgcattccattttaactcttcttgagctaaaacgtcaaataggagaggaagataagataaatatttgtaaataaaacctaaagtttaaatgttttaatctgaataattgtacataaaattttgtatctctaacattccaaattactgtcaataaaatatatatttattattttaaatgctatgtgttaatatttcacttgcttgtattagaaaggcaaaatgtaagactttggtatgtgtgacatatgctttatttggctttattttacaagtacagtatctgcaaaaaacaaagtaaccttttttcatacctgccagttttgaatttatatatgttattgaacaaatagtaatagaggattcgctgttgaaacaagttgtccaagcaatgttatattcatttttatacttattgggaaagtgtgagttaatattggacacattttatcctgatccacagtggagttttagtaattatattttgttgatttcttcattttgttttctggtataaaagtagagataatgtgtagtcacttctgatttagtgaaaccaattgtaataattgtggaaatgttttgtctttaagtgtaaatattttaaaatttgacataccctaatgttaataataaaaagaactatttgcataaaaaaaaaaaaaaaaaaaaaaaaaaaaaaaaaaaaa

SEQ ID NO: 498 - protein, 441 aa, Homo sapiens
MEIRLDTLSASLGRSSTLNDCNLEDKLAWYEGEAYMWHHWKPFPENPLWTCLDFQIAQVGPWDYCSSCIRHTRLKSSCSDMDLLHSWRSSSFGNFDRFRNNSLSKPDDSTEAHEGDPTNGSGEQSKTSNNGGGLGKKMRAISWTMKKKVGKKYIKALSEEKDEEDGENAHPYRNSDPVIGTHTEKVSLKASDSMDSLYSGQSSSSGITSCSDGTSNRDSFRLDDDGPYSGPFCGRARVHTDFTPSPYDTDSLKIKKGDIIDIICKTPMGMWTGMLNNKVGNFKFIYVDVISEEEAAPKKIKANRRSNSKKSKTLQEFLERIHLQEYTSTLLLNGYETLEDLKDIKESHLIELNIENPDDRRRLLSAAENFLEEEIIQEQENEPEPLSLSSDISLNKSQLDDCPRDSGCYISSGNSDNGKEDLESENLSDMVHKIIITEPSD

SEQ ID NO: 499 - DNA, 980 bp, Homo sapiens
ggggcagacgtgggacgggaaggacggctgccgggactggcgcgcggggacactgggccgacgcgtggagtagcggggagagcgggaagcctgagggggcggggccggcgcgaggccgtgggtgcggcacgaggatgccggcggcgggacagcgcccgtaggcagccccacgggcagggcgcgcgggcggggcggggcgggccgggccagaggagctcccggcatgtcgcaagggctcccggccgccggcagcgtcctgcagaggagcgtcgcggcgcccgggaaccagccgcagccgcagccgcagcagcagagccctgaggatgatgacaggaaggtccgaaggagagaaaaaaaccgagttgctgctcagagaagtcggaagaagcagacccagaaggctgacaagctccatgaggaatatgagagcctggagcaagaaaacaccatgctgcggagagagatcgggaagctgacagaggagctgaagcacctgacagaggcactgaaggagcacgagaagatgtgcccgctgctgctctgccctatgaactttgtgccagtgcctccccggccggaccctgtggccggctgcttgccccgatgaagccggggacactcctctgcccagcaaggagccttggtcattttcatacctgggaggaaggcttttccttcacaattgtatacagggggcacctgtggccaggcctcctcctgggagctccaggaccagccagctgtgttccctgcagactgggctcagcccgacatccaacaggcgccaaactcacagagcccttgtgcagatccagcatggaggccaccctcaggagtgacttctcatccaccctggcagctagtaggttctgctgttatgcagagccatttcctctagaatttggataataaagatgcttattgtctctcccttctccagttctgggaatttacaggcacaatacacttccttttcctgg

SEQ ID NO: 500 - protein, 127 aa, Homo sapiens
MSQGLPAAGSVLQRSVAAPGNQPQPQPQQQSPEDDDRKVRRREKNRVAAQRSRKKQTQKADKLHEEYESLEQENTMLRREIGKLTEELKHLTEALKEHEKMCPLLLCPMNFVPVPPRPDPVAGCLPR

SEQ ID NO: 501 - DNA, 2530 bp, Homo sapiens; identical to SEQ ID NO: 331

SEQ ID NO: 502 - protein, 406 aa, Homo sapiens; identical to SEQ ID NO: 332

SEQ ID NO: 503 - DNA, 2192 bp, Homo sapiens
tccctgtcctgcgcccgcgcgccccgggagcctacccagcacgcgctccgcgcccactggttccctccagccgccgccgtccagccgagtccccactccggagtcgccgctgccgcggggacatggtcctctgcgttcaggggtgagcacccccttgtaagctcagggctactgttgggtgtcagggaacaaagttttagactgctgcgctccaaagcgggcacacacatgtacctagaacacaccagccactgtccccaccatgatgatgacacagccatggacacacccctgcccagacctcgtcctttgctggctgtggagcggactgggcagcggcccctgtgggccccgtccctggaactgcccaagccagtcatgcagcccttgcctgctggggccttcctcgaggaggtggcagagggtaccccagcccagacagagagtgagccaaaggtgctggacccagaggaggatctgctgtgcatagccaagaccttctcctaccttcgggaatctggctggtattggggttccattacggccagcgaggcccgacaacacctgcagaagatgccagaaggcacgttcttagtacgtgacagcacgcaccccagctacctgttcacgctgtcagtgaaaaccactcgtggccccaccaatgtacgcattgagtatgccgactccagcttccgtctggactccaactgcttgtccaggccacgcatcctggcctttccggatgtggtcagccttgtgcagcactatgtggcctcctgcactgctgatacccgaagcgacagccccgatcctgctcccaccccggccctgcctatgcctaaggaggatgcgcctagtgacccagcactgcctgctcctccaccagccactgctgtacacctaaaactggtgcagccctttgtacgcagaagcagtgcccgcagcctgcaacacctgtgccgccttgtcatcaaccgtctggtggccgacgtggactgcctgccactgccccggcgcatggccgactacctccgacagtaccccttccagctctgactgtacggggcaatctgcccaccctcacccagtcgcaccctggaggggacatcagccccagctggacttgggcccccactgtccctcctccaggcatcctggtgcctgcatacctctggcagctggcccaggaagagccagcaagagcaaggcatgggagaggggaggtgtcacacaacttggaggtaaatgcccccaggccgcatgtggcttcattatactgagccatgtgtcagaggatggggagacaggcaggaccttgtctcacctgtgggctgggcccagacctccactcgcttgcctgccctggccacctgaactgtatgggcactctcagccctggtttttcaatccccagggtcgggtaggacccctactggcagccagcctctgtttctgggaggatgacatgcagaggaactgagatcgacagtgactagtgaccccttgttgaggggtaagccaggctaggggactgcacaattatacactatttatttatttattctccttggggttggtgtcaggggcgagccaaccccacctctatgccctgagccctggtagtccagagaccccaactctgccctggcttctctggttcttccctgtggaaagcccatcctgagacatcttgctggaaccaaggcaatcctggatgtcctggtactgacccacccgtctgtgaatgtgtccactctcttctgcccccagccatatttggggaggatggacaactacaataggtaagaaaatgcagccggagcctcagtccccagcagagcctgtgtctcaccccctcacaggacagagctgtatctgcatagagctggtctcactgtggcgcaggccccggggggagtgcctgtgctgtcaggaagagggggtgctggtttgagggccaccactgcagttctgctaggtctgcttcctgcccaggaaggtgcctgcacatgagaggagagaaatacacgtctgataagacttcatgaaataataattatagcaaagaacagtttggtggtcttttctcttccactgatttttctgtaatgacattatacctttattacctctttattttattacctctataataaaatgatacctttttcatgtaaaaaaaaaaaaaaaaa

SEQ ID NO: 504 - protein, 258 aa, Homo sapiens
MVLCVQGPRPLLAVERTGQRPLWAPSLELPKPVMQPLPAGAFLEEVAEGTPAQTESEPKVLDPEEDLLCIAKTFSYLRESGWYWGSITASEARQHLQKMPEGTFLVRDSTHPSYLFTLSVKTTRGPTNVRIEYADSSFRLDSNCLSRPRILAFPDVVSLVQHYVASCTADTRSDSPDPAPTPALPMPKEDAPSDPALPAPPPATAVHLKLVQPFVRRSSARSLQHLCRLVINRLVADVDCLPLPRRMADYLRQYPFQL

SEQ ID NO: 505 - DNA, 1819 bp, Homo sapiens
ctggagacatttttgattgtcacaaatgatgggtgttgtgtttctggcatgggtagagggatgctactaaacatcctaccgtgcacaggatggccctccacaatggattctgtggccccaaatgttaatagtgccaaagttgagagaccctggggtagagacgtgtgatgggaaggaaagaaaattacctttagagctgcgcgccgcggcggcggaagatggctgcggccgagttggcggacactcagctgatgcttggagtcgggctgatcgaaaaggacacaaatggagaagttctgtgggtgtggtgttatccttccacgacagccacattaaggaacctgctgctgagaaaatgctgccttacagatgaaaacaaacttctccatccctttgtctttggtcagtacagaagaacatggttttatatcacaataattgaagttccagattcttccattttgaaaaaggtgactcatttttctattgtcctgaccgccaaagattttaacccagagaagtatgctgccttcactaggatattgtgtagaatgtacctgaaacatgggagcccagttaaaatgatggagagttatattgcagttctcacaaaggggatatgccagagtgaagaaaacggctctttccttagtaaggattttgatgcccgaaaggcctacccggctggctccatcaaagacattgtatctcagtttggaatggaaactgttatcttacacacagcactgatgctaaagaaaagaattgtggtgtatcaccccaagatagaagcggtccaggagttcaccaggactctgcctgccctggtgtggcaccgacaggactggaccatccttcactcttacgtgcacctcaacgccgatgagctggaagccctgcagatgtgcacaggttacgtcgctggatttgtagacttggaggtgagcaacagaccagacctctatgatgtgtttgtgaatctggcagagagtgagattaccattgctccccttgcaaaagaggccatggcaatgggcaaactgcacaaagaaatgggtcagctaattgttcagtctgcagaagatccagagaaatcagagagccacgttatacaggatattgctctaaaaacaagagaaatctttaccaacctagcaccattttcagaagtttcggctgatggagaaaagagagtccttaatttggaggcgctaaagcaaaaacgatttccaccagcaacagaaaacttcctttatcatctagcagcagccgaacaaaatgctgaaaatctgactgtgtgacagaaccgtatcactgatgactgatagaaagccctctttactctgattacccactcactacatgaagtcctgaaaataacagagaaactgttatatctttttaatgatttatttgcaagtattgagatttgacctgaaaaacaatgaaacacatgaacacacttccgattttctcctcgctgattagcttcctgcctgctgtcagtgctggacgaagtgctataactactttatgtaacattacagaacagctagaggtcctggggtaagagaaaaaaagcacatcacaacaaatgtgaaagccttcattattacacgttccagtttgtctcgctgtgtaggcataagctaatggtttattttcagaaagctgcctgaaacgttgctttgtattcttctaggaagaactttaattcctcctgaggaactctactttctgagccaaactgctaattttctgcggaactgtctagaagatcattcaagagaccctgcagttgcactttctcgtaaaagtt

SEQ ID NO: 506 - protein, 360 aa, Homo sapiens
MAAAELADTQLMLGVGLIEKDTNGEVLWVWCYPSTTATLRNLLLRKCCLTDENKLLHPFVFGQYRRTWFYITIIEVPDSSILKKVTHFSIVLTAKDFNPEKYAAFTRILCRMYLKHGSPVKMMESYIAVLTKGICQSEENGSFLSKDFDARKAYPAGSIKDIVSQFGMETVILHTALMLKKRIVVYHPKIEAVQEFTRTLPALVWHRQDWTILHSYVHLNADELEALQMCTGYVAGFVDLEVSNRPDLYDVFVNLAESEITIAPLAKEAMAMGKLHKEMGQLIVQSAEDPEKSESHVIQDIALKTREIFTNLAPFSEVSADGEKRVLNLEALKQKRFPPATENFLYHLAAAEQNAENLTV
